United States Patent Application Publication US 2023/0212674 A1 - sequence listing, part 2

SEQ ID NO: 4450 - DNA, 486 bp, Homo sapiens
  misc_feature 1..486: note = U/M: U (0.03:0.91) in Erythrocyte progenitor cells
  misc_feature 1..486: note = source = chr16:68806081-68806566; Gene: CDH1 (intron)
  source 1..486: mol_type = genomic DNA
cgtgttgccacacaacggccaatcgcatatgtccttgccttgcttaccacctaatcgggcaggcctagcagacagggacactgcctttcttatcctcttcgtgccatgcatggaagggcggggctccattagaacttggaagcttcctctctaatttatggtttgtccctctccaacatatgggagagatagataagtctctttaattagttcactaagattaataagccatagacccatcaaggaaaattcaataaatgttcactgggcatcttttatgcaccaggctctgtctacattcagagcgagagaacagtcacagctgacatctatggaccacttacaactggcctggctctgggctaacccgcaccgtatacagatcttatatatacttcactccataccctgtgatgtaggtcttcctcaaaatcaccacactatgtcaaattgcccatgaaaaacaccagacttaggctgggcacg

SEQ ID NO: 4451 - DNA, 253 bp, Homo sapiens
  misc_feature 1..253: note = U/M: U (0.12:0.93) in Erythrocyte progenitor cells
  misc_feature 1..253: note = source = chr3:10178211-10178463; Gene: VHL (Intergenic)
  source 1..253: mol_type = genomic DNA
cggaagaggggggaggctcaggcatggcgggctgcagctcctgggccctgcccggctgggaggcagctaaggccctgcgagaaattgagcacagcagctgctggcccaggtgataagcccctcactgccctgggcttgcaggccggctgagcccacgcccacccggaacttgtgctagcccacaagcgccacggcagccccggttcccgcccgcacctctccctccacacctccctgcaagctgagggagccg

SEQ ID NO: 4452 - DNA, 97 bp, Homo sapiens
  misc_feature 1..97: note = U/M: U (0.17:0.96) in Erythrocyte progenitor cells
  misc_feature 1..97: note = source = chr13:111948368-111948464; Gene: ARHGEF7 (TTS)
  source 1..97: mol_type = genomic DNA
cgctgcgttgctcctggagcagttagttgtgtgtcgtcagataaggccccagagtggtgtctaacagccaagcgtggtggtcgcgagctggcactcg

SEQ ID NO: 4453 - DNA, 230 bp, Homo sapiens
  misc_feature 1..230: note = U/M: U (0.17:0.91) in Erythrocyte progenitor cells
  misc_feature 1..230: note = source = chr14:103213119-103213348; Gene: TRAF3 (Intergenic)
  source 1..230: mol_type = genomic DNA
cgggtggggcaggtcctgaggtgggggttccgcctctgagcctgatgtcagcaggagatacttgtcctccccaccatttcctgggctgactctcggggttgtctctacggccgggtgatatgaggcctacacagcgaacataggccccaggcagctgcctgctgggtgtgtacgtggcggttcctcgggtacacgaactagcaggagtgactgtggaggcagccaggacg

SEQ ID NO: 4454 - DNA, 458 bp, Homo sapiens
  misc_feature 1..458: note = U/M: U (0.06:0.92) in Erythrocyte progenitor cells
  misc_feature 1..458: note = source = chr9:114911542-114911999; Gene: SUSD1 (intron)
  source 1..458: mol_type = genomic DNA
cgttgggaatgaatgtcttgttgttgtttgtggctcgatatccttccaggcaaatgcaatagaagcccccgggggtgttgtggcaagatgtgtggttcccacagacaagagtggctccaaactggcactcatttttatctgttgacacacagacaaggcaccggaagagctatcaatccacaccgacttcaacagcccagactgtcctcccatgctatggactcgggaaccaacgttctgtgaccacaccttagtgatctatttctccagcctcttctcctttcacgatgctccccagactacaggacctgggcccctcgtagttatgtgccaggagtgtatgaaaccccaagagaaacacaacacctcaatctggcaatccgtctgatttgaagattgggagaagagggttctctttgaacttttccaagcttaaaaagatcttttcagaggcccac

SEQ ID NO: 4455 - DNA, 168 bp, Homo sapiens
  misc_feature 1..168: note = U/M: U (0:0.9) in Erythrocyte progenitor cells
  misc_feature 1..168: note = source = chr14:31666439-31666606; Gene: HECTD1 (intron)
  source 1..168: mol_type = genomic DNA
cgtggctggtctcgaactcctgacctcaactgatccacccacctcggcctcccaaagtgctgggactgcagataggcatgagccaccacgcccagtcccagcccttaactttttaccatcaaacccaaaacatgtgcatctaacgtctctatcttctctgttacaacg

SEQ ID NO: 4456 - DNA, 225 bp, Homo sapiens
  misc_feature 1..225: note = U/M: U (0.03:0.91) in Erythrocyte progenitor cells
  misc_feature 1..225: note = source = chr22:38532110-38532334; Gene: PLA2G6 (intron)
  source 1..225: mol_type = genomic DNA
cgaggttctagaacaggcaagttctgagagacagagaggatatgggacttatcgggggctgtggggaggggagaatcgggagttattaatggttacagtttctgtttgaggtgataagaaaagttttagaaaggggtaatggttggacaacattgtaaatgtgattaaaaccaccgaattgtacacttaaaagtggttaaaatgggccgggtgtggtggctcacg

SEQ ID NO: 4457 - DNA, 273 bp, Homo sapiens
  misc_feature 1..273: note = U/M: U (0.05:0.93) in Erythrocyte progenitor cells
  misc_feature 1..273: note = source = chr9:106864248-106864520; Gene: SMC2,SMC2 (intron,exon)
  source 1..273: mol_type = genomic DNA
cgtcctacttggagtaccaaaaagtaatgagagaaatagaacatttgagtcgtttatatattgcttatcagtttttgctggctgaagataccaaagtacgctcagctgaggaattaaaagaaatgcaagataaagttataaagcttcaggaagaattgtctgagaatgataaaaaaataaaagcacttaatcatgaaatagaagaattggaaaaaagaaaagataaggtctgaacatatgtataagaatcgataatatactctgtgaaaaacg

SEQ ID NO: 4458 - DNA, 299 bp, Homo sapiens
  misc_feature 1..299: note = U/M: U (0.01:0.89) in Erythrocyte progenitor cells
  misc_feature 1..299: note = source = chr19:5996750-5997048; Gene: RFX2 (intron)
  source 1..299: mol_type = genomic DNA
cgaggcctcccctgtgtggcgggacgcccaaggacaacctccttccagagccagcggtgcgatggggactgtgaacttggacagagccccaaatccttcccagtgctgataaaacttgtggttttgatgttttgagacactgctgtgtcctggcacgggtgggcccgtttctgtggcttgttctttatcgagctgcagctctgtccgggcggcagagcagtgggacctgcgagtgtcctctctctgggctgctcagagcacaccgccctctccccacaggcccggccaagccccggccg

SEQ ID NO: 4459 - DNA, 412 bp, Homo sapiens
  misc_feature 1..412: note = U/M: U (0.02:0.89) in Erythrocyte progenitor cells
  misc_feature 1..412: note = source = chr20:30495416-30495827; Gene: TTLL9 (intron)
  source 1..412: mol_type = genomic DNA
cgggaggctgaggaaggaaaatcgcttgaacccgggaggaggaggttgcagtgaactgagatctcgccattgcactccagcctgggtaacaaagtgatacaccgtctcgaaaaaagaaaaaaaaaaaaccactgcatagaaatgataacacaccaaactcaggctgatggtttccttcgcggcagaacagaaggagatacaatcaggcagggatagacagggggcttcagttgtatctgtacttttttacttaaaaataattgtgaacaatcatgatagtgttttatttcctgtggcatctttttcaaacacctcctccccgcaccccagctctggcacccagatttggtagattggcccggtttcctctccctggcatggtggtggagaatgggatcagaatttggagccg

SEQ ID NO: 4460 - DNA, 380 bp, Homo sapiens
  misc_feature 1..380: note = U/M: U (0.05:0.9) in Erythrocyte progenitor cells
  misc_feature 1..380: note = source = chr15:78555871-78556250; Gene: DNAJA4,DNAJA4 (promoter-TSS,Intergenic)
  source 1..380: mol_type = genomic DNA
cgttggggcctgctttccacgcccacttttctgcaacggtttgtgatctggactccctgagcacccgttgggagctgggggcagcctagggaagtcgggacctactcctgtacccttccaaggcaagcatcctgggccacctagccgtttcagggtccaggccatgggaccccctgtgcataacactgggcccaacagcctggtcgggccctgatgtttgctcactgatgatgtgcagaggagagggggcagtttcccacttctgggagaagagagggcactgtcggcccttggcagacttggggggcgtcactgcccatatgtgggggacgtcactgctcaccttgagggacttaagggttcccagtggtgggcattcg

SEQ ID NO: 4461 - DNA, 143 bp, Homo sapiens
  misc_feature 1..143: note = U/M: U (0.08:0.92) in Erythrocyte progenitor cells
  misc_feature 1..143: note = source = chr20:45993559-45993701; Gene: ZMYND8 (Intergenic)
  source 1..143: mol_type = genomic DNA
cgggagttcgagaccagcctgaccaacatggagaaaccccgtctctactaaaaatacaaaattagccaggcgtggtggctcatgcctgtaatctcagctactcaggaggctgaggcaggagaatcgcttgaacccgggaggcg

SEQ ID NO: 4462 - DNA, 294 bp, Homo sapiens
  misc_feature 1..294: note = U/M: U (0.09:0.92) in Erythrocyte progenitor cells
  misc_feature 1..294: note = source = chr14:20871852-20872145; Gene: TEP1 (intron)
  source 1..294: mol_type = genomic DNA
cgtgggtcgagggctggggcagtgactgactggagagcggggtggccggcgggggtgtctcttggcccggtgcttccgagggttgtacttagccagctggtactcgtcaaactgggcaaatttgtccgtcatggcagtacggagacaggcgggcaggggcaccagcttattcttatctccctcagccaggctctgtcaaagagagaggagagaccactagaagcaagacccaaaccaaccctccaaaacaaaacgagatcacttcatggagatacacgagagcacagagtagcg

SEQ ID NO: 4463 - DNA, 494 bp, Homo sapiens
  misc_feature 1..494: note = U/M: U (0.16:0.95) in Erythrocyte progenitor cells
  misc_feature 1..494: note = source = chr14:39786036-39786529; Gene: CTAGE5 (intron)
  source 1..494: mol_type = genomic DNA
cggtaaccaggctgtttctggaagggcagcaggaacatcttacagatcttacagagacactgacttgtaaagattagaatgaaaaccacaaacaacaatggccaagaagggaatatgctgaggtccagaggtaacaattccacatccctccctcaccgctgcgtatttagtgaagtcttctaaggtagataaaggttatctcagatgacatgggtagaggctacaaagagacagttaagcagttggatataaagatcgggacagccagatgacacctaggatatatctgtcctcacgtgttctagagcacagggcaggcaggaaaacccaaggaaccacaggctaaagaattacatatcaggaaggtcacttgggagaagctccacagacaaggtgtgtttttagctgaattgggattggtagagggaatgaaagtgacactgagcagtagcttgtcacacgctccagagctgagctacccacaggagcagacg

SEQ ID NO: 4464 - DNA, 136 bp, Homo sapiens
  misc_feature 1..136: note = U/M: U (0.15:0.91) in Erythrocyte progenitor cells
  misc_feature 1..136: note = source = chr22:39884875-39885010; Gene: MGAT3 (exon)
  source 1..136: mol_type = genomic DNA
cggcggcgggcgggtggcgccacaggggtcccgagggaaggccgcccgcccggggcaaactggacgaggcggaagtctagagctgcatgatctgatagggtttgtgacagggcgggggtggcggcggcccctagcg

SEQ ID NO: 4465 - DNA, 201 bp, Homo sapiens
  misc_feature 1..201: note = U/M: M (0.63:0.06) in Erythrocyte progenitor cells
  misc_feature 1..201: note = source = chr17:80171382-80171582; Gene: CCDC57 (promoter-TSS)
  source 1..201: mol_type = genomic DNA
cgtatccatctgcggatggatgaacagagcccggccccgggacagagcagcctggctcacccgaaccctcagcccgcaattctgcgtgggagtggagggggtgtttggtgtctgggaattcccctggtggggcaataagccaggggtctggtgtcatcctccacccacattgttaacactggatcactcctctccgtgccg

SEQ ID NO: 4466 - DNA, 119 bp, Homo sapiens
  misc_feature 1..119: note = U/M: M (0.55:0.11) in Erythrocyte progenitor cells
  misc_feature 1..119: note = source = chr6:157505409-157505527; Gene: ARID1B (exon)
  source 1..119: mol_type = genomic DNA
cgttggcacctcaagcagtgcagcgagctccctgaaaaagcagtatattcagtacctgtttgcctttgagtgcaagatcgaacgtggggaggagcccccgccggaagtcttcagcaccg

SEQ ID NO: 4467 - DNA, 154 bp, Homo sapiens
  misc_feature 1..154: note = U/M: M (0.58:0.21) in Erythrocyte progenitor cells
  misc_feature 1..154: note = source = chr5:127417834-127417987; Gene: FLJ33630 (intron)
  source 1..154: mol_type = genomic DNA
cgaggtcaggagatcgagaccatcctggctaacacggtgaaaccccgactctactaaaaatacaaaaaattagcagggcgtgatggcgggcgcctgtagtcccaactactcaggaggctgaggcaggaggagaatggcgtgaacccaggaggcg

SEQ ID NO: 4468 - DNA, 152 bp, Homo sapiens
  misc_feature 1..152: note = U/M: M (0.57:0.22) in Erythrocyte progenitor cells
  misc_feature 1..152: note = source = chr11:796841-796992; Gene: SLC25A22 (promoter-TSS)
  source 1..152: mol_type = genomic DNA
cgtcccactcagggcttcaccgtcagacctgcctttccctgcctcagccagtggtggtgacaagctgacctctgaacttctacctgatccctcctagccccccccacccctgccgccccactcttcgggtgcagactggccacagctctccg

SEQ ID NO: 4469 - DNA, 31 bp, Homo sapiens
  misc_feature 1..31: note = U/M: M (0.54:0.21) in Erythrocyte progenitor cells
  misc_feature 1..31: note = source = chr1:151162943-151162973; Gene: VPS72 (promoter-TSS)
  source 1..31: mol_type = genomic DNA
cgtagggacggagtctcgcctcgctctgtcg

SEQ ID NO: 4470 - DNA, 258 bp, Homo sapiens
  misc_feature 1..258: note = U/M: M (0.82:0.87) in Erythrocyte progenitor cells
  misc_feature 1..258: note = source = chr8:89392239-89392496; Gene: MMP16 (Intergenic)
  source 1..258: mol_type = genomic DNA
cggagtctcgctctgtcgcccaggctggagtgcagtggcgggatctcggctcactgcaagctccgcctcccgggttcacgccattctcctgcctcagcctcccaagtagctgggactacaggcgcccgccactacgcccggctaattttttgtatttttagtagagacggggtttcaccgttttagccaggatggtctcgatctcctgacctcgtgatccgcccgcctcggcctcccaaagtgctgggattacaggcg

SEQ ID NO: 4471 - DNA, 114 bp, Homo sapiens
  misc_feature 1..114: note = U/M: U (0.03:0.92) in Epidermal Keratinocytes
  misc_feature 1..114: note = source = chrX:84117156-84117269; Gene: UBE2DNL (Intergenic)
  source 1..114: mol_type = genomic DNA
cgtgcgcacgcatgtgcgctcgcgcacgcacacgcgcacacacacacacacacacacagagatcctatagcttttacttcagaattttagccatgacataaatacaaattcacc

SEQ ID NO: 4472 - DNA, 210 bp, Homo sapiens
  misc_feature 1..210: note = U/M: U (0.02:0.9) in Epidermal Keratinocytes
  misc_feature 1..210: note = source = chr5:2592741-2592950; Gene: IRX2 (Intergenic)
  source 1..210: mol_type = genomic DNA
cgatacaaacatcggaaagtaacccaaagaaccatttcctcttctgagacttacacataaattatatatgcaccgtatacaaataatactactaaaattgagcctaagaattgatcttccaagtatcctggggtggggggaaacagggtaaaatgaactgcctttttagaaacatcgtagtcttcatcgatgctactttttatagagtac

SEQ ID NO: 4473 - DNA, 341 bp, Homo sapiens
  misc_feature 1..341: note = U/M: U (0.03:0.9) in Epidermal Keratinocytes
  misc_feature 1..341: note = source = chr16:79143557-79143897; Gene: WWOX (intron)
  source 1..341: mol_type = genomic DNA
cgctccaagtttggtgttcattatttatctctaaattatgatattcatagaacaactccttgctttttcaccaagaatctagaatctagaattatctgagcgttcgcatcagataactaggaagaaatcagagtcattttctctctaaggcaggctcgatgatacctgcacagaagcagaggtttcccaagcatgcatgttactgcagtacaagatttggcattctgcatgttggggttgtttagaaacagaaactttggagtagtatgtgagcttaaaatgtcagttgcatggaaatgaaagtgccaaccctccaaatcaagagtccagcccgttatgtc

SEQ ID NO: 4474 - DNA, 231 bp, Homo sapiens
  misc_feature 1..231: note = U/M: U (0.07:0.92) in Epidermal Keratinocytes
  misc_feature 1..231: note = source = chr3:65838606-65838836; Gene: MAGI1 (intron)
  source 1..231: mol_type = genomic DNA
cgagaccatcctggctaacacggtgaaaccccgtatctactaaaaatacaaaaaaaaaaaaaaaaaaaattagccgggcatggtggcacgtgcctgtagtcccaactactcgggaggctgaggcagggaaatcgcttgaacccaggaggtggaggttccctccgggaaccaagtgcattgagccgagatttgtgccactgcactccagccagggcgacagagcgagactcc

SEQ ID NO: 4475 - DNA, 129 bp, Homo sapiens
  misc_feature 1..129: note = U/M: U (0.11:0.95) in Epidermal Keratinocytes
  misc_feature 1..129: note = source = chr8:90867618-90867746; Gene: OSGIN2 (Intergenic)
  source 1..129: mol_type = genomic DNA
cgtcgctaccaaaaatacaaaaattagccgggcatgggggtgcatgcctgtaatcccagcaacttcacaggctgaggcacaaccatggcttgaacccaggaggtgcgggttgcagtgagccaagatcac

SEQ ID NO: 4476 - DNA, 122 bp, Homo sapiens
  misc_feature 1..122: note = U/M: U (0.09:0.92) in Epidermal Keratinocytes
  misc_feature 1..122: note = source = chr12:4424217-4424338; Gene: C12orf5 (Intergenic)
  source 1..122: mol_type = genomic DNA
cgtggtggcgggtacctgtaatcccagctactcaggagcctggggcagaagaatcgcttgaacctgggaggtggaggtttcagtgagctgagatcacgccactgcactccagcctgggtgac

SEQ ID NO: 4477 - DNA, 250 bp, Homo sapiens
  misc_feature 1..250: note = U/M: U (0.1:0.91) in Epidermal Keratinocytes
  misc_feature 1..250: note = source = chr12:106289786-106290035; Gene: NUAK1 (Intergenic)
  source 1..250: mol_type = genomic DNA
cgtcattcgcaagcaatataacctggggaaaggtaagctgcctctcccaggtttgacttctaatctataacaggatgagggtaataagaactgccttgcagactcatgatgaaggaaagagttcatacaaattgagcccgtagcatgctacctgatatgtaggaagtgttccaataaattttagttgttattgttattctcatcattctcacagggccagtggaaattgtttcctaacatcgaactgacc

SEQ ID NO: 4478 - DNA, 159 bp, Homo sapiens
  misc_feature 1..159: note = U/M: U (0.13:0.93) in Epidermal Keratinocytes
  misc_feature 1..159: note = source = chr19:2230349-2230507; Gene: DOT1L (exon)
  source 1..159: mol_type = genomic DNA
cgccctggcgcctgccctgagctcttcacctttaccccggcactgtgaacccccagactgttcaccctccggggcgtgggttgcgcccttgcatgtgaaggggcctgcgcggtgacgcagctggccatgtgctgcgcgatggtgctgtgaggacggcgc

SEQ ID NO: 4479 - DNA, 374 bp, Homo sapiens
  misc_feature 1..374: note = U/M: U (0.11:0.89) in Epidermal Keratinocytes
  misc_feature 1..374: note = source = chr1:32466777-32467150; Gene: KHDRBS1 (Intergenic)
  source 1..374: mol_type = genomic DNA
cgaagtagtcaccttgggcgggtgtgtctatccttgctctgacagtgccatattgctcaaaggtattttggggccttatcttttagaactgacttcaggatcacttcaaaagttacacaagctcttagacaagatggcatgaagaaaaaagttacagaagaaaactagattcacagctgggcatggtggcttatatctgtaatcccagcactttgggaggctgaggcagagggtcgcttgagtccaggagttaaagaacagcctggtcatggcagtgaaaccccatctctacaaaagaaacaaatttaaattaactgggcatgatggtacgtgcctgttgtcccagctactgggaagactgaagcaggaggatc

SEQ ID NO: 4480 - DNA, 260 bp, Homo sapiens
  misc_feature 1..260: note = U/M: U (0.15:0.92) in Epidermal Keratinocytes
  misc_feature 1..260: note = source = chr21:46169969-46170228; Gene: TSPEAR (Intergenic)
  source 1..260: mol_type = genomic DNA
cggctggtctccccgcaccgggctggcaccctgcaacgccagtcacccaccccacgcagctggcatccccgcaccgggccggcatcccacaacgccagtcacccaccccacgcggctggcctccctgcaccgggctggcaccccgcaacgccagtcacccaccccacgaagctggcctccccgcaccggtgccagcaccccgccgcgccagtcacccagagtcctcctgccccaggaatgaaaccatcctcaggccgggc

SEQ ID NO: 4481 - DNA, 270 bp, Homo sapiens
  misc_feature 1..270: note = U/M: U (0.14:0.91) in Epidermal Keratinocytes
  misc_feature 1..270: note = source = chr1:6010708-6010977; Gene: NPHP4 (intron)
  source 1..270: mol_type = genomic DNA
cgagagcaagcccagactggctgccacaggagaggccacaggagccacgccaccccaaccaaagtcatcctagaccagcagcccccagcggaccagccaactcattgcaggcccatgaagattttccaaaaaagtcccttttacttcctgctcgagattctactaaaagtcaggatacacatggaagaatgctcagccccaacctgaaaatagcccaaaagtccatcaacagtagaatggatttataaatcctggtgccctcacacggac

SEQ ID NO: 4482 - DNA, 391 bp, Homo sapiens
  misc_feature 1..391: note = U/M: U (0.15:0.91) in Epidermal Keratinocytes
  misc_feature 1..391: note = source = chr1:116471365-116471755; Gene: SLC22A15 (Intergenic)
  source 1..391: mol_type = genomic DNA
cgcccgcctcggcctcccaaagtgctgggattacaggcgtgagccaccgcgcccggccccccgctgaacactttaagtgaatgtcattgtctcattctcattgacagtcagcaagtaaacatatccacagactaaagtaaggtctctccctactctgggaaaggtgggaccattcttcgatatttgtcatataagccactttaaacttgtaaaaactgaaaagtaataaatcaccaatcatcttctgttctctgatgttatctcactaggactctgctatattaagaaagagattgaggcagaatgttttcacaagattgctcaaagtcatgtgcagcaagcacatgagatatacaactctcattgcttttatcacataattcttcaaagc

SEQ ID NO: 4483 - DNA, 122 bp, Homo sapiens
  misc_feature 1..122: note = U/M: U (0.17:0.92) in Epidermal Keratinocytes
  misc_feature 1..122: note = source = chr15:35320312-35320433; Gene: ZNF770 (Intergenic)
  source 1..122: mol_type = genomic DNA
cgagtagctgggactacaggtgttggccaccacgcccgtctaattttttgtatttttagtagagacggggtttcaccgtgttagctgggatggtctccatctcccgacctcgtgatccgccc

SEQ ID NO: 4484 - DNA, 357 bp, Homo sapiens
  misc_feature 1..357: note = U/M: U (0.2:0.93) in Epidermal Keratinocytes
  misc_feature 1..357: note = source = chr3:37890977-37891333; Gene: CTDSPL (Intergenic)
  source 1..357: mol_type = genomic DNA
cgcaggaaaagtacccgtcttagcccctgatcacgtgctcctcgtccaggtaacctcatctccagaaaaatgaggctgaggaggtttgactaatgattatgcttatcccagaataattttctagatttctgtcaatgccttcccttcctcagataaatccagtacaatcatttcctacgccatcctgctttaagcacagcatgcaggagtggcgggagcttagagttaagatctggaaactcccaatcaatgacttgccctgtcatcttgagcagcggcttcccggacagataggattccccgacacaaaggcaatcatcaccatctcagctctgatggagcaagccacttaacctc

SEQ ID NO: 4485 - DNA, 475 bp, Homo sapiens
  misc_feature 1..475: note = U/M: U (0.2:0.92) in Epidermal Keratinocytes
  misc_feature 1..475: note = source = chr12:106749774-106750248; Gene: POLR3B (Intergenic)
  source 1..475: mol_type = genomic DNA
cgacagagtaagactccatccccgccccccaccaaaaaagcaaaatttcagccccaatttaccaatcagaaagctgagattagtttaacaagctctccaggtgattctgatacaccctaaagtcggagaatcaccttgataatggaaagcaaagaagactttggcacagacaaccaacacacttgagccaaccttgagatcctctgccatctataaatcactttcacagtcccttctaggctagatgctaaattggttgcaatctggtaatgcacaatgatgagacacaagttgtatcttgtctctgtaataagtaaattgtaagaacttcaaaggcagggttgattctacttttggtgttttttccattcttctcgtatttcagatatcagtgcaatacttagaaaatacggccgggcgcggtggctcacgcctgtaatcccagctactcgggaggctgaggcaggagaatggc

SEQ ID NO: 4486 - DNA, 468 bp, Homo sapiens
  misc_feature 1..468: note = U/M: U (0.27:0.96) in Epidermal Keratinocytes
  misc_feature 1..468: note = source = chr13:27699652-27700119; Gene: USP12 (intron)
  source 1..468: mol_type = genomic DNA
cggtctacagctccctgcgagatcgatgcagaaggcgggtgatttctgcatttccatctgaggtacctggttcatctcattgggactggctggacagtgggtacagtccacggagggtgagcggaagcagggtggggcgtcccctcacccgggaagcgcaaggggtcaagggatttccctttcctagccaagtgaagctgtgagtgactgtacctggaggaagggtacactactgcccaaatactgtgcttttctgacggtctttgcaaccggcagaccaggagactccctcccgtgcctggcttatgggtcccacgcccagggagccttgctcgctgctagcacagcagtttgagattgacctgggacgctggagcttggcagggggaggggcgtccgccattgctgaggcttgagtaggtggttctgtgcttacagcataaagcagcagggaagcttgaactgggc

SEQ ID NO: 4487 - DNA, 437 bp, Homo sapiens
  misc_feature 1..437: note = U/M: U (0.24:0.92) in Epidermal Keratinocytes
  misc_feature 1..437: note = source = chr12:6475922-6476358; Gene: SCNN1A (intron)
  source 1..437: mol_type = genomic DNA
cgccattgcactccagcctgggcaaccagagcgaaactccatctcaaaaaaaaaaaaaagaaaaagatttgtacatgaatgttcatagccattttatttataatagccaaaaagcctgaagcaactcaaaggtgtgttgaaggtgtgtgtttggcattctagaaaacttgctcattactgctaattaaaagaatggtaatctgcggggcatggtggctcacacctgtaattccagaattttggaaggccaagtgggtggatcacttgagctcagaagtttgagaccagcctgggcaacacgacgaaaccttgtatctacaaaaaatacaaaaattagccagatgtggtggtgcacacctgtagtcccagctactcagaagactgaggcagaagaattgcctgatcctgggagtttgaggctacagtgagccgtgatc

SEQ ID NO: 4488 - DNA, 286 bp, Homo sapiens
  misc_feature 1..286: note = U/M: U (0.27:0.94) in Epidermal Keratinocytes
  misc_feature 1..286: note = source = chr1:246959768-246960053; Gene: LOC149134 (Intergenic)
  source 1..286: mol_type = genomic DNA
cggagccctgtcaccaggtggctgggatgcacagccagggtggagctctgtcttgctggaggtggccaaccctccatgggcttccagcgtcatctctccgcaggaagccctcagcgggcagacatcaggtggccactgtccaaatctggtaaggaaaaacatcctgggagaaagaatgttctcaaaataaaaatgaggcttgtcgcggtggctcacgcctgtaaccccagcacttctcgaagccgaggcaggaggattacttgagcccaggagatttgaggctgtc

SEQ ID NO: 4489 - DNA, 487 bp, Homo sapiens
  misc_feature 1..487: note = U/M: U (0.27:0.93) in Epidermal Keratinocytes
  misc_feature 1..487: note = source = chr19:877313-877799; Gene: MED16 (intron)
  source 1..487: mol_type = genomic DNA
cgcgcatgtgtctgtagcgtctgtacctttctgtcagggtcatgcacaatgcctctgggaacagggaaggaaacctccctgagccccgactgcactggatgccgagccaggcttacactcgtctgctttacctgaggagtctaccccgtgaaaggcggtcctctcaacagctcctagttacgaagctcctaatacgtgctgtgagccaccccactgacctcgctcaacaagacgaacccatcacacagacaaggcagcgcaggcaggggctggcgaggggcttgcacctgtggtcccttcccccgggggcgcctccctctggcaccctcccagccccagccccagccccagacccacgtgccccagcagctcgccttcccctggttgtcaatgcccaccagcccctgccccacgtgccccagcagctcaccttcccctggttgtcaatgcccaccagccccagccccagccccagccccagccccac

SEQ ID NO: 4490 - DNA, 245 bp, Homo sapiens
  misc_feature 1..245: note = U/M: U (0.3:0.93) in Epidermal Keratinocytes
  misc_feature 1..245: note = source = chr11:61917560-61917804; Gene: INCENP (intron)
  source 1..245: mol_type = genomic DNA
cgcaagggcacagggcccctcccaagatcaacccagataactacgggatggatctgaatagcgacgactccaccgatgatgaggcccatccccggaagcccatccccacctgggcccgaggtaagcaaagcccacagctccctgggagactcaggccctccctggtcctcaccttgagggccctggaagtagtgggttggctgctgcggtgttgggaggctgccgtgtgcttcagttggcagttc

SEQ ID NO: 4491 - DNA, 133 bp, Homo sapiens
  misc_feature 1..133: note = U/M: U (0.03:0.63) in Epidermal Keratinocytes
  misc_feature 1..133: note = source = chr8:2135497-2135629; Gene: MYOM2 (Intergenic)
  source 1..133: mol_type = genomic DNA
cgctggaaaggatggggagaagatggaatcagccagtcggttcatgtcctccgcacctgagccgtatgctggaaaggttggagagaagatggaatcagccagtcggttcatgtcctccgcacctgagccgtac

SEQ ID NO: 4492 - DNA, 200 bp, Homo sapiens
  misc_feature 1..200: note = U/M: U (0.35:0.95) in Epidermal Keratinocytes
  misc_feature 1..200: note = source = chr17:2172445-2172644; Gene: SMG6 (intron)
  source 1..200: mol_type = genomic DNA
cggagcttgcagtgagccgagatcgcagcactgcactccagcctgggcgacagagccagactccatctcaaaaaaaaaaaaaaaaaaaaaattagccgggtgcagtggtaggtgcctgtaatcccagctacttggcaggctgaggcatgagaatcacttgaacctgggaggcgaaggttgcaatgagccgagatcgtgcc

SEQ ID NO: 4493 - DNA, 63 bp, Homo sapiens
  misc_feature 1..63: note = U/M: U (0.05:0.93) in Epidermal Keratinocytes
  misc_feature 1..63: note = source = chr18:28876586-28876648; Gene: DSG1 (Intergenic)
  source 1..63: mol_type = genomic DNA
cggggtttcaccgttttagccgggatggtctcgatctcctgacctcgtgatccgcccgcctcg

SEQ ID NO: 4494 - DNA, 64 bp, Homo sapiens
  misc_feature 1..64: note = U/M: U (0.04:0.92) in Epidermal Keratinocytes
  misc_feature 1..64: note = source = chr15:52531305-52531368; Gene: MYO5C (intron)
  source 1..64: mol_type = genomic DNA
cgcccggctaattttgtatttttagtagagacgggatttcgcaatgttggtcacgctggtctcg

SEQ ID NO: 4495 - DNA, 57 bp, Homo sapiens
  misc_feature 1..57: note = U/M: U (0.06:0.93) in Epidermal Keratinocytes
  misc_feature 1..57: note = source = chr19:48925153-48925209; Gene: GRIN2D,GRIN2D (exon,intron)
  source 1..57: mol_type = genomic DNA
cgctacaaccagccccgcgtagaggaagcgctcactcagctcaaggcagggtcagcg

SEQ ID NO: 4496 - DNA, 132 bp, Homo sapiens
  misc_feature 1..132: note = U/M: U (0.03:0.9) in Epidermal Keratinocytes
  misc_feature 1..132: note = source = chr6:169850857-169850988; Gene: THBS2 (Intergenic)
  source 1..132: mol_type = genomic DNA
cgtagcggtcccgagatccagcgtgtctctgctaggatcagcggtttgctccttggtgttgctgaggaaaattctactgcatggaacaccaccatctatccacactggatagacaccagatgagtgcttccg

SEQ ID NO: 4497 - DNA, 67 bp, Homo sapiens
  misc_feature 1..67: note = U/M: U (0.07:0.92) in Epidermal Keratinocytes
  misc_feature 1..67: note = source = chr11:76869347-76869413; Gene: MYO7A (intron)
  source 1..67: mol_type = genomic DNA
cgggtggacagccaggagtacgccaacatccgctccgccatgaaggtgctcatgttcactgacaccg

SEQ ID NO: 4498 - DNA, 220 bp, Homo sapiens
  misc_feature 1..220: note = U/M: U (0.04:0.89) in Epidermal Keratinocytes
  misc_feature 1..220: note = source = chr15:28099623-28099842; Gene: OCA2 (intron)
  source 1..220: mol_type = genomic DNA
cgtcaaatatacactggaagagaaataagtagcacgctaggaaaagcatctgattctgcgtctatcaatctgatgcagaatcagaaactcctggcagcagggtgctcccatgcagtccctgaggcacttttcaagctttgcttttgttgtcttatgataaacgcgattatcatagaggcacctttagacttgatgtcttcgttcttcggaggagtgagcg

SEQ ID NO: 4499 - DNA, 104 bp, Homo sapiens
  misc_feature 1..104: note = U/M: U (0.08:0.92) in Epidermal Keratinocytes
  misc_feature 1..104: note = source = chrX:152998053-152998156; Gene: ABCD1 (intron)
  source 1..104: mol_type = genomic DNA
cgtaggtgcccagcccagtcagcgcacctagccccgggcaccgagacagcccgcgagacagcacctgcagccgcttcgctccatggctgccattggtcacatcg

SEQ ID NO: 4500 - DNA, 146 bp, Homo sapiens
  misc_feature 1..146: note = U/M: U (0.03:0.87) in Epidermal Keratinocytes
  misc_feature 1..146: note = source = chr11:48080498-48080643; Gene: PTPRJ (intron)
  source 1..146: mol_type = genomic DNA
cgtcacgttcatgcctgcctctgggctttgcatgggccttcttcccaggcacaacgtggggctctccccacttcttccaccctacagagaggccggccctgatcagctgttttataatagctcctcccgatcagtactcctgatcg

SEQ ID NO: 4501 - DNA, 282 bp, Homo sapiens
  misc_feature 1..282: note = U/M: U (0.07:0.9) in Epidermal Keratinocytes
  misc_feature 1..282: note = source = chr11:114089536-114089817; Gene: ZBTB16 (intron)
  source 1..282: mol_type = genomic DNA
cgagagaaaagcagtaaattcaatgataagaatttaaaattaaaatgtttcggtgcttttatattctgcaaaacatgaaatgagtgagtttgttgcctgttgccataaacctcacccagctaatcgtccgcttgagttttttcctgtctcttttgctcatcaccatcaattctgtcttggcacaaggcgtaaagtgagagccgtgtgtgtgtgtgtgcatgtgcgtgtgcacgcccatgtgctggcatgtgtatgcatgtacgtgcgtgtatatgtatagcg

SEQ ID NO: 4502 - DNA, 353 bp, Homo sapiens
  misc_feature 1..353: note = U/M: U (0.07:0.9) in Epidermal Keratinocytes
  misc_feature 1..353: note = source = chr1:246959348-246959700; Gene: LOC149134 (Intergenic)
  source 1..353: mol_type = genomic DNA
cgctttgttgaggctgaagcctcagcgagtcgggtcgtgtgcctgggaatgggccaggtggggctcggggctggcccaccctctgtctgagcctttgggtagcctggcatgatgggtagggcatggggcgcaggaggttctgccactactcgagggtccccaggagggagggagaccgttcgatattgctgctttgataccggacgttcatgccaatttcacctcagtagttttattttacctttttttcatctcattttaaatcattaatgagcataaaacgatatatatctttatgctgccaaactgcaattgaaggtctgtacctatcacaggggttctcgataattgcg

SEQ ID NO: 4503 - DNA, 356 bp, Homo sapiens
  misc_feature 1..356: note = U/M: U (0.09:0.91) in Epidermal Keratinocytes
  misc_feature 1..356: note = source = chr12:92677309-92677664; Gene: BTG1 (Intergenic)
  source 1..356: mol_type = genomic DNA
cgcctagtattctctacaaataggatttcagagtccaaaacttttgatttagaaaatgaaacagctcttgttaattctaatagaaaaaggcagcttgatttccaatgctctgttttaatttgggttttaccagccggtgattttattgaaagtgaaatccgtattcctgtgtagcttaagcatctcaactctaaaatgggaaaaatcacagtttcagtaacagaattgagaatgaggtcctggcatctttcttaaaaggaatttggataagacttctcgataaatgctcacaaattactcacaccgtatgtctaaatatacacaaacaggtttagaaaacctggttggagtcaacg

SEQ ID NO: 4504 - DNA, 97 bp, Homo sapiens
  misc_feature 1..97: note = U/M: U (0.1:0.91) in Epidermal Keratinocytes
  misc_feature 1..97: note = source = chr16:88760182-88760278; Gene: SNAI3 (Intergenic)
  source 1..97: mol_type = genomic DNA
cgcgctttctggggagcagggttcatgcttcccatgcagctgcataacgtgaaaacaagggcatgctgccccaagtctgcgacgggcctggaccgcg

SEQ ID NO: 4505 - DNA, 117 bp, Homo sapiens
  misc_feature 1..117: note = U/M: U (0.06:0.87) in Epidermal Keratinocytes
  misc_feature 1..117: note = source = chr16:57849240-57849356; Gene: KIFC3 (Intergenic)
  source 1..117: mol_type = genomic DNA
cgggttgcttctgttagctcaaggccacaggtacatctctgtgcttagagatccacaccgcaccccaccaccgccacgtgttttctaggatcccctccaagcattttccaaagcccg

SEQ ID NO: 4506 - DNA, 133 bp, Homo sapiens
  misc_feature 1..133: note = U/M: U (0.07:0.88) in Epidermal Keratinocytes
  misc_feature 1..133: note = source = chr14:101868213-101868345; Gene: DIO3OS (Intergenic)
  source 1..133: mol_type = genomic DNA
cgcactgatgaatagcagaggatgagaaccctgcaggccaggcacaggcagcatcaaagaaacagagggtggagcacaggtgcccagcccaggagatttaaaatcagatcagggacgggcgcgatggctcacg

SEQ ID NO: 4507 - DNA, 153 bp, Homo sapiens
  misc_feature 1..153: note = U/M: U (0.08:0.89) in Epidermal Keratinocytes
  misc_feature 1..153: note = source = chrX:152079723-152079875; Gene: ZNF185 (Intergenic)
  source 1..153: mol_type = genomic DNA
cgggccctgagggagaagcagggcttagctcggcggaagttggaagggcatttcaggtgggcggaccagtataagctaaggcacaggcattcacttggcagggctaccttccagggactccaaggcacatggtctgcttggagcacagtgtcg

SEQ ID NO: 4508 - DNA, 72 bp, Homo sapiens
  misc_feature 1..72: note = U/M: U (0:0.8) in Epidermal Keratinocytes
  misc_feature 1..72: note = source = chrX:48349412-48349483; Gene: FTSJ1 (Intergenic)
  source 1..72: mol_type = genomic DNA
cgggataattggtatgcatgcccgcacataggtgtgtgcgtaccagtacgtgtgaagttatgcaggagtgcg

SEQ ID NO: 4509 - DNA, 139 bp, Homo sapiens
  misc_feature 1..139: note = U/M: U (0.1:0.9) in Epidermal Keratinocytes
  misc_feature 1..139: note = source = chr9:136527053-136527191; Gene: DBH (Intergenic)
  source 1..139: mol_type = genomic DNA
cggggtctgggaaggtgggtcttttgtgatgtggtccccgggcggtgcacttgggagccatggcggggccaggacctctggcagcgcagggatggagcccgcaggtgatgagcttgggaggtgagttgtggaggctgcg

SEQ ID NO: 4510 - DNA, 229 bp, Homo sapiens
  misc_feature 1..229: note = U/M: U (0.12:0.92) in Epidermal Keratinocytes
  misc_feature 1..229: note = source = chr8:20176552-20176780; Gene: LZTS1-AS1 (Intergenic)
  source 1..229: mol_type = genomic DNA
cgcatcaacaaagatgttcccaaacttgtggtgaaattggcagtcacttggtgtcttgccctataccttatctttttgtctttacatttagcctttgaaggataaccaaaaaggaagactcagagctggttctctgaagggatggagatgtacgcatctgcggtccctgcagtcagctattctaagacctgctttttttgaccgagctttatagtatctttaggactcg

SEQ ID NO: 4511 - DNA, 58 bp, Homo sapiens
  misc_feature 1..58: note = U/M: U (0.11:0.9) in Epidermal Keratinocytes
  misc_feature 1..58: note = source = chr13:106891181-106891238; Gene: LINC00460 (Intergenic)
  source 1..58: mol_type = genomic DNA
cgtttccccagaacacgcgatgcttccctggggctgtatatcatcgctgatgaagacg

SEQ ID NO: 4512 - DNA, 279 bp, Homo sapiens
  misc_feature 1..279: note = U/M: U (0.14:0.93) in Epidermal Keratinocytes
  misc_feature 1..279: note = source = chr16:15803146-15803424; Gene: MYH11 (intron)
  source 1..279: mol_type = genomic DNA
cgccaagagcatttggtgaggctggtagatgaaaggataagcagttttttgatactctgtcacccaggatggagtgcactggcatgatctatctctgctcactgcaacctccacctcccgggttcaagcgattctcctgcctcagcctcccgagtagctgggattacaggcatgcaccaccgtggctggctaattttcatatttttagtagagacggagtttcaccatgttggccatgctggtctcgaactcctgacctcaagtgatccacccacctcg

SEQ ID NO: 4513 - DNA, 179 bp, Homo sapiens
  misc_feature 1..179: note = U/M: U (0.1:0.88) in Epidermal Keratinocytes
  misc_feature 1..179: note = source = chr15:99659291-99659469; Gene: SYNM (exon)
  source 1..179: mol_type = genomic DNA
cgttttattgcactagcagcagaatggtaagggaaacatgctcggggacagggagggactgcacctgcgaatctcccggccctcaagattctgatgaggttagtgacaggtggaaccggcacagtggtttcaaacctccctggatgattgtcaggtaccaccagggtggagaatccccg

SEQ ID NO: 4514 - DNA, 219 bp, Homo sapiens
  misc_feature 1..219: note = U/M: U (0.12:0.9) in Epidermal Keratinocytes
  misc_feature 1..219: note = source = chr1:32171523-32171741; Gene: COL16A1 (Intergenic)
  source 1..219: mol_type = genomic DNA
cgcctagaaacactatcatagacagtctaggaatgtgcccatgccccttcctcccttccacacatacgtgcacacatccagaaacacgcagtcaggtaaagttctagcacagcacttgagtacgcagactccatatgcatgtataggcactcatgttcacacagacacaccctggccctagaaacagttacacacagatgtgtagagactcaagatacg

SEQ ID NO: 4515 - DNA, 293 bp, Homo sapiens
  misc_feature 1..293: note = U/M: U (0.05:0.83) in Epidermal Keratinocytes
  misc_feature 1..293: note = source = chr8:2135178-2135470; Gene: MYOM2 (Intergenic)
  source 1..293: mol_type = genomic DNA
cgtggagggatgcgatgcaccagaatgcctccatgtcctctgcacctgagccacacgctggaaaggatggagagaagatggaatcagccagtccgttcatgtcctctgcacctgagccagatgctggaaaggatggagagaagatggaatcagccagtccgttcatgtcctctgcacctgagccagaggctggaaaggatggagagaagatggaatcagccagtccgttcatgtcctctgcacctgagccagacgctggaaaggatggagagaagatggaatcagccagtccg

SEQ ID NO: 4516 - DNA, 334 bp, Homo sapiens
  misc_feature 1..334: note = U/M: U (0.12:0.89) in Epidermal Keratinocytes
  misc_feature 1..334: note = source = chr10:91252311-91252644; Gene: SLC16A12 (intron)
  source 1..334: mol_type = genomic DNA
cgtggagaaaccccgtctctacttaaaatacaagagtatttttagtctctactaaaaacacaagagtgcgatggtgccgacatggcaagtaatttatttgggcaagtctgaactaagtcataattaagtattcataagataaaaaagacaatctacatttgttgtatagcaccatggagtttatattcacaaatattactctttctaagactcagaccaatctagtatgaaaggtagagaaggttaatagtcatctcctgcctttgtctacccaacatctatgccctttcctttaggaaacaacacctcagtattcccattctcagttcaagcg

SEQ ID NO: 4517 - DNA, 498 bp, Homo sapiens
  misc_feature 1..498: note = U/M: U (0.11:0.88) in Epidermal Keratinocytes
  misc_feature 1..498: note = source = chr6:82008699-82009196; Gene: FAM46A (Intergenic)
  source 1..498: mol_type = genomic DNA
cggtgcttgccataatgcgaagaggcattattaggcatgttgtggttaagagcatgcatttttgcaccaggttctcacagtttgaattgtagacccatcactttacaagatgtgtgatcttgggcaagttatttaactactctatttcttcctctggttaaatagacacaataatgacatctatttaataggaattttgtaatgatcaaatatttaatatatgtaaaatacttagatctataacaagtagttccaggaaagagtaaatatttttttggtaactttcacccatcactactgtgactggtgttttacctaatctgacttccgtcccatcacctgtgccacttgttaccccaacaatctccctttccatacatttcctcattctgtaattctgttcttggagaaggtgcaatagcctcaagagtttaccttcttactgtatactgttggctagatagatgtcggcaagctaacttggtaacttagaggccg

SEQ ID NO: 4518 - DNA, 91 bp, Homo sapiens
  misc_feature 1..91: note = U/M: U (0.16:0.92) in Epidermal Keratinocytes
  misc_feature 1..91: note = source = chr1:939040-939130; Gene: HES4 (Intergenic)
  source 1..91: mol_type = genomic DNA
cggcgcaggtcccagcgcgccccgttccaaggctgcccgcacacagtagggtggttgctgagcgtgctgttttggggtggtttgtggtgcg

SEQ ID NO: 4519 - DNA, 108 bp, Homo sapiens
  misc_feature 1..108: note = U/M: U (0.16:0.92) in Epidermal Keratinocytes
  misc_feature 1..108: note = source = chr1:38507780-38507887; Gene: POU3F1 (Intergenic)
  source 1..108: mol_type = genomic DNA
cgcgcaggcggcgggagctctcagcttcatttgcttccatttcagagccttgaggctgggacaaatccaggaatggagaaatgagggagcagggaggagtgtgtggcg

SEQ ID NO: 4520 - DNA, 160 bp, Homo sapiens
  misc_feature 1..160: note = U/M: U (0.14:0.9) in Epidermal Keratinocytes
  misc_feature 1..160: note = source = chr1:116690861-116691020; Gene: MAB21L3 (Intergenic)
  source 1..160: mol_type = genomic DNA
cgctccctactaaacattctgctacgcatctttatcaccaagctgccttccagggatttcaatttatggcaccgtggacagacagtctacaggcatccctttaaaatccagctctgccctttagagtgtggcgatcttgggcaagtctcttcatttctcg

SEQ ID NO: 4521 - DNA, 348 bp, Homo sapiens
  misc_feature 1..348: note = U/M: U (0.13:0.89) in Epidermal Keratinocytes
  misc_feature 1..348: note = source = chr2:110424988-110425335; Gene: SOWAHC (Intergenic)
  source 1..348: mol_type = genomic DNA
cggcactagaactataggttagaggcagggctggagtctatttccagtcctttgcttggccgtgttctgccctgtgcattttaatgtggagtcataggcatggctggggagcccttcctcctggttagtggcacacagagcccatagaatgatgaacagaggtggttttgcggtaaaggtaaatgtgctcacacctgtatctccatgccaacaatgatttcctagctcgggatgcattttcaaggcgttaacattcatttggatcctggattgcctctatcttggattccatcagctgacatgcctggatgggagtgtgcggtgtctgtgagagtattctgatgctcg

SEQ ID NO: 4522 - DNA, 397 bp, Homo sapiens
  misc_feature 1..397: note = U/M: U (0.09:0.85) in Epidermal Keratinocytes
  misc_feature 1..397: note = source = chr17:76553240-76553636; Gene: DNAH17 (intron)
  source 1..397: mol_type = genomic DNA
cgccacctcctagcccctcacacacagcttcctcatgataatcctactctgggttccaggaaatgcccatccagtcctccccacattaacagaagtaatggaagcaatgttgaatgactttaatattatccaaaatttgttcaggagggtaaatagatctataaagaatcatgtaattggccaggcttggggccttatgcctgtaatcccaacactttgggaggcagaggcgggcaaatcacctaaggtcaagagttcgagaccagcctggccaatgtggtgaaactgtgtctctactaaaaatacaaaaattatttgtatttttactaccaccagctgggcttggtggtacacgcctgtagtcccagctactcaggaggctgagccaggagaatcg

SEQ ID NO: 4523 - DNA, 56 bp, Homo sapiens
  misc_feature 1..56: note = U/M: U (0.16:0.91) in Epidermal Keratinocytes
  misc_feature 1..56: note = source = chr14:98414975-98415030; Gene: C14orf64 (intron)
  source 1..56: mol_type = genomic DNA
cgaatgcaacatcaacagcatggagttagggaggccggcgtttaccaacaaacgcg

SEQ ID NO: 4524 - DNA, 145 bp, Homo sapiens
  misc_feature 1..145: note = U/M: U (0.1:0.85) in Epidermal Keratinocytes
  misc_feature 1..145: note = source = chr10:125117714-125117858; Gene: BUB3 (Intergenic)
  source 1..145: mol_type = genomic DNA
cgggcccttagtatcattctccgtagaactttgggataatgcttccatggggttccttaaccgagaaactccagaaaaggcggtgacatcagcaaaagggagccaactccttccccgtctgccgttttgtactcttggcctaacg

SEQ ID NO: 4525 - DNA, 273 bp, Homo sapiens
  misc_feature 1..273: note = U/M: U (0.2:0.95) in Epidermal Keratinocytes
  misc_feature 1..273: note = source = chr5:80982809-80983081; Gene: SSBP2 (intron)
  source 1..273: mol_type = genomic DNA
cgaagtgaatgactattcacacaaaaaaggaccttcctaagaaccaaaaatcagacgagtcataacagtacctggttttaacttcggatcactgaaagcagcactgaagagagtagaaaagacagttttgaattactgatgccaccctacccgatcacccggcagcggccgcatggtacggagaatctgtgccattgtgggagggagagcacagtgactgtgggacttcgcattggaactcagtgctgcatgtcacagcagagagcaacaccg

SEQ ID NO: 4526 - DNA, 321 bp, Homo sapiens
  misc_feature 1..321: note = U/M: U (0.18:0.93) in Epidermal Keratinocytes
  misc_feature 1..321: note = source = chr17:54926110-54926430; Gene: DGKE (intron)
  source 1..321: mol_type = genomic DNA
cgatctatccaatacattgggttggggtacaggttatgctggagaaattccagttgcgcaggttttgcgaaatgtaatggaagcagatggaattaaactagatcggtaagttacgtttccccaaaaagtagatttcttgagatttagccataattggttaacaagtgaagacttgtgtagatgaaatgtgccatgtaatttaaatgtgaaagactatactagttgtacctacacagatactggtgttttgttttattatgtaagagccgaagtaataagttacactgagtacttatccctaaatttgcatgctcatatacg

SEQ ID NO: 4527 - DNA, 407 bp, Homo sapiens
  misc_feature 1..407: note = U/M: U (0.19:0.94) in Epidermal Keratinocytes
  misc_feature 1..407: note = source = chr9:130938714-130939120; Gene: CIZ1 (intron)
  source 1..407: mol_type = genomic DNA
cgctgctggtgctgaggctccgacatgtggtcctggaactcctgcagcaggagggaaagagggatgggcctggggcgtgagcccagaacagtgggcaaggctggggcctggggaggcagaccccagcctcatcactgtgcgcccatttctctcaccacacatttctctcttgtgtaggctagagcaggcatgataaactaagacacagggtacatgccagcccgagcttctgcccctcccagagaatgtgtgagtgcctcaaagacaaggagcggcctgattagcatccaggtctccaaggctgtgccaggtgaggcacagagtaacacagctcacagcacaagagtagtaatacaagtacaatgcgatcatgattactgctacactcactttgggccaggcctgcg

SEQ ID NO: 4528 - DNA, 85 bp, Homo sapiens
  misc_feature 1..85: note = U/M: U (0.15:0.89) in Epidermal Keratinocytes
  misc_feature 1..85: note = source = chr7:2160533-2160617; Gene: MAD1L1 (intron)
  source 1..85: mol_type = genomic DNA
cggggcgaggaaggtcttcacccctgcacctgctctagggcaggcgcagacctgacgtggggaggcccagcaaggaagacaggcg

SEQ ID NO: 4529 - DNA, 97 bp, Homo sapiens
  misc_feature 1..97: note = U/M: U (0.14:0.88) in Epidermal Keratinocytes
  misc_feature 1..97: note = source = chr10:44702307-44702403; Gene: LOC100130539 (Intergenic)
  source 1..97: mol_type = genomic DNA
cgtgtacgggcacaaagtgccccaggccagaaggaatctgatgccgatattggaaaaactcgtgtgtgtgcagatggcgccctgaagttagaattcg

SEQ ID NO: 4530 - DNA, 158 bp, Homo sapiens
  misc_feature 1..158: note = U/M: U (0.15:0.89) in Epidermal Keratinocytes
  misc_feature 1..158: note = source = chr7:116085373-116085530; Gene: CAV2 (Intergenic)
  source 1..158: mol_type = genomic DNA
cgtaggtacaatgcacgccatggggtgtagctgggaagggtgtgtttggggtggaagcaaaaatcataaggtcacccgaatgctagttgaggggtaagacacacgaagagtaagcaagatgcccccaaaattccatttcacggtattgcctctagtcg

SEQ ID NO: 4531 - DNA, 236 bp, Homo sapiens
  misc_feature 1..236: note = U/M: U (0.15:0.89) in Epidermal Keratinocytes
  misc_feature 1..236: note = source = chr1:214721551-214721786; Gene: PTPN14 (intron)
  source 1..236: mol_type = genomic DNA
cgctagaattccaacctagctatatttcaaactcccaaacctggaccgcctgctccagcacactgacagccaggaaaagctacagaatttgccacacataccccttggaccactcaataagccctccatgggatgcatacagaggaagcgtaaattaaatcaatttaaatccgtaaggggagatccaaaagcgtattttaacattaacttgaacctcctccctaccaaagctttcg

SEQ ID NO: 4532 - DNA, 281 bp, Homo sapiens
  misc_feature 1..281: note = U/M: U (0.14:0.88) in Epidermal Keratinocytes
  misc_feature 1..281: note = source = chr10:63424439-63424719; Gene: C10orf107 (intron)
  source 1..281: mol_type = genomic DNA
cgctaattcgctgcttggtggaaactccattttccgttttaatgaaagcagagtttctgtagttcatggggaatatagttgatgcatagagctgtgtcattcattaaaacaagtcctgcctgccacccatttgtgctgattgggggtgtcgtatgttagatagaaaaatggcaagattctctcttgtggtctgttcccaaggccaccactttttaggtaaatactgaaaggttcttctcagatcaaattctttacaatgttgatcccccaacagctaatcg

SEQ ID NO: 4533 - DNA, 452 bp, Homo sapiens
  misc_feature 1..452: note = U/M: U (0.11:0.85) in Epidermal Keratinocytes
  misc_feature 1..452: note = source = chr1:211701785-211702236; Gene: RD3 (Intergenic)
  source 1..452: mol_type = genomic DNA
cgcagtctcaacttcccaggtgtctcacgtgtccgtgtgaacagatcaccaaacaggctttgtgtgagcagcatagctgtttatttcacctgggtgcaggcaggctgagtccaaaaaaggaggcagcaaagggttgtgggattaccattggttcttataggttttgggataggaggtggagttaagagcaatgtttttggggcagagggtggatctcacaaagtacattcaagggtggggcgaattataaagaaacttcttaagggtgggggaaattatcaagaacattgatcagttagggtggggcagaaacaaatcacaatggtggaatgtcatcagttaatgctattttcacttctgtggatcttcagttgcttcaggccatctggatgtacacaagcaggtcactggggatatgatggcttagcttaggctctgaggtctgacacccg

SEQ ID NO: 4534 - DNA, 240 bp, Homo sapiens
  misc_feature 1..240: note = U/M: U (0.12:0.85) in Epidermal Keratinocytes
  misc_feature 1..240: note = source = chrX:49127163-49127402; Gene: PPP1R3F (promoter-TSS)
  source 1..240: mol_type = genomic DNA
cggccgcaactacacagtcctgctccggatcgcacccgctcccacacccactgatgccgaagggctgccccagcagcagcagctgccgcagctggagccacagcccgagtgccagggtcccgtggaggctgaggccaggcagctgaagagctgcatgaagccggtgaggcgcaggtaatgtcagccagcgccacctccgccaacgcagggctgtgtctgggatggaggacaagcattccg

SEQ ID NO: 4535 - DNA, 103 bp, Homo sapiens
  misc_feature 1..103: note = U/M: U (0.16:0.88) in Epidermal Keratinocytes
  misc_feature 1..103: note = source = chr8:98391448-98391550; Gene: TSPYL5 (Intergenic)
  source 1..103: mol_type = genomic DNA
cgatagcagctggccggtaaggtcccatcactcagagggtgtgtgactgacgacggcatattccagtgcagccctttgaagtcggttcttgaaagacagtacg

SEQ ID NO: 4536 - DNA, 163 bp, Homo sapiens
  misc_feature 1..163: note = U/M: U (0.11:0.83) in Epidermal Keratinocytes
  misc_feature 1..163: note = source = chrX:48330441-48330603; Gene: SLC38A5 (Intergenic)
  source 1..163: mol_type = genomic DNA
cgaaaccccgtctctactaaaaatacaaaaaaaattagctgggcgtggtggcgggttcctgtaatcccagctactcgggaggctgaggcaagagaattgcttgaacctggaaggcggaggttgcagtgagccaagatcgcgccactgcactccggcccaagcg

SEQ ID NO: 4537 - DNA, 201 bp, Homo sapiens
  misc_feature 1..201: note = U/M: U (0.15:0.87) in Epidermal Keratinocytes
  misc_feature 1..201: note = source = chr7:152289520-152289720; Gene: XRCC2 (Intergenic)
  source 1..201: mol_type = genomic DNA
cggtgaaggtttctcagtggctgctcagtggctctggatcctcaccaaactgacccctgccattgaatgtcccttgcctctgtgagttcatgcattcatctctctcatccctttcatgcttcccagaaactctaatgtcatgttggcgcatttgttgtacacctacacgtggaatcccggctgtgggtctctaggaaaacg

SEQ ID NO: 4538 - DNA, 227 bp, Homo sapiens
  misc_feature 1..227: note = U/M: U (0.2:0.92) in Epidermal Keratinocytes
  misc_feature 1..227: note = source = chr17:48895912-48896138; Gene: WFIKKN2 (Intergenic)
  source 1..227: mol_type = genomic DNA
cggtgttccaggagctgcagatacaactttgaaggcagtggctcgaaaccctggctgcaagtaaaaatcacctgggagtttttttttaattttttatttttatttttattattttttttgagacggagtcttgttctgtcgcccaggctggagtacagtggcatgatctcggctcactgtaacctctgcctcttgggttcaagcgattctcctgcctcagcctcccg

SEQ ID NO: 4539 - DNA, 242 bp, Homo sapiens
  misc_feature 1..242: note = U/M: U (0.13:0.84) in Epidermal Keratinocytes
  misc_feature 1..242: note = source = chr21:44578204-44578445; Gene: CRYAA (Intergenic)
  source 1..242: mol_type = genomic DNA
cggataagcacaatacaagagagagctacaggccagctgcattcagagcacaggtggaaaatcctaaacgtaacagagctgaacccatcgtcccatctagcgctcctgggaggcaagcctgggctggggtgcccccacccatcctggtgagagcctcgggctgagctgccttgatcccaagggttctgcttccccatggttccccgaagggcccagaaagacacgtcagaaagttggggacg

SEQ ID NO: 4540 - DNA, 363 bp, Homo sapiens
  misc_feature 1..363: note = U/M: U (0.22:0.93) in Epidermal Keratinocytes
  misc_feature 1..363: note = source = chr7:148180198-148180560; Gene: C7orf33 (Intergenic)
  source 1..363: mol_type = genomic DNA
cgtgagccaccacactcaaccctgcttaacttttgaagcctgcaattcacatattcctcttgacatcctttccaagattcacttgcatgaagggtgtggctgccttccagcagcttcacatgtaatggttctttagagaagtggaagcaagggcaattgctctggagcaacattctaggaaagtgcttggtgctgttgatggggtaagggaggggcatttggaatacttcaagaagacttgagccaaatcatcaccttggggtgattacacacctgccctgcgcaccacccagaagctggaggccggggagaggttcaccgcagagcctgggagaggcctgcggaagtgatcctcagctgtcg

SEQ ID NO: 4541 - DNA, 87 bp, Homo sapiens
  misc_feature 1..87: note = U/M: U (0.12:0.82) in Epidermal Keratinocytes
  misc_feature 1..87: note = source = chr9:132905816-132905902; Gene: NCS1 (Intergenic)
  source 1..87: mol_type = genomic DNA
cgccctgcatcagccattctagcgtatgtccttagacataactgcgtctctgtcactcagagccctggttccagtcggcctccgtcg

SEQ ID NO: 4542 - DNA, 134 bp, Homo sapiens
  misc_feature 1..134: note = U/M: U (0.22:0.92) in Epidermal Keratinocytes
  misc_feature 1..134: note = source = chr15:85372719-85372852; Gene: ALPK3 (intron)
  source 1..134: mol_type = genomic DNA
cgtgaggatgagacagcaaagactggtacctagggcgactccgtttctgtaagtcttacatgattattcatgaggaggtaggaagcggtgttgctcctaagcatgttctgggtggtcctctgggtgcacatgcg

SEQ ID NO: 4543 - DNA, 185 bp, Homo sapiens
  misc_feature 1..185: note = U/M: U (0.13:0.83) in Epidermal Keratinocytes
  misc_feature 1..185: note = source = chr9:139151659-139151843; Gene: QSOX2 (Intergenic)
  source 1..185: mol_type = genomic DNA
cgccccatgaggagcccttcccagacagaacctgagtggtttcccggctggcacacccctcgatctgtatcttgggaatgctggctgccagtgcacggggtggcccgcctgctggcaaacccactgtgtgctctgctgtgctgagatgcagaaacagggaggccggggtggcccggtcacaggcg

SEQ ID NO: 4544 - DNA, 241 bp, Homo sapiens
  misc_feature 1..241: note = U/M: U (0.11:0.81) in Epidermal Keratinocytes
  misc_feature 1..241: note = source = chrX:151807905-151808145; Gene: GABRQ (intron)
  source 1..241: mol_type = genomic DNA
cgtcaaagatttgaagagtcacagtgatgccggggcctgttctgattcgcaagccctgttggggaaggagccctgttgaaggtctaggtgaattgggtgagcgtgtcagagatctctggaaaagccagctctccacagagctgggctgagtccacttacctatgctcacccaagacacctccagggtggaagcacatgctcagcaagagatatacctgctcccagaatagatgtctttccg

SEQ ID NO: 4545 - DNA, 103 bp, Homo sapiens
  misc_feature 1..103: note = U/M: U (0.2:0.89) in Epidermal Keratinocytes
  misc_feature 1..103: note = source = chr18:77938790-77938892; Gene: PARD6G (intron)
  source 1..103: mol_type = genomic DNA
cggggcaccgatagctctccacatgcagatgccccacagcaaagaaatgtccagcgcagaacgtcagcagtgctgagggtaagaacccggcctcacacgcacg

SEQ ID NO: 4546 - DNA, 130 bp, Homo sapiens
  misc_feature 1..130: note = U/M: U (0.15:0.84) in Epidermal Keratinocytes
  misc_feature 1..130: note = source = chr11:57126582-57126711; Gene: P2RX3 (intron)
  source 1..130: mol_type = genomic DNA
cgtcaccactgtagacctgccgcccccgcgggaggaatgggagcctggttttgagctggggtgcctgacaggagcagcagtcaaagtgacacagccacaggcaaaatcaaggcagagcagggaagcagcg

SEQ ID NO: 4547 - DNA, 162 bp, Homo sapiens
  misc_feature 1..162: note = U/M: U (0.26:0.95) in Epidermal Keratinocytes
  misc_feature 1..162: note = source = chr17:71097077-71097238; Gene: SLC39A11 (Intergenic)
  source 1..162: mol_type = genomic DNA
cgctctgtcacccaggctggagtgcggtggcacaatcttggctcactgcagcctccatcccccaggttcaagtgattctcctgcctcagtctcctgagtagctgggattacaggtgcccgccagcgtactgggctaagttttgtatttttagtagagacgcg

SEQ ID NO: 4548 - DNA, 254 bp, Homo sapiens
  misc_feature 1..254: note = U/M: U (0.19:0.88) in Epidermal Keratinocytes
  misc_feature 1..254: note = source = chr1:237546768-237547021; Gene: RYR2 (intron)
  source 1..254: mol_type = genomic DNA
cgcctaggctggagtacaggggcacgatctcggctcgctgcaagctccacctcccgggttcacgccattctcctgcctcagcctcctgagtagctgggactgtaggtgcctgccaccacacccggataattttttatatttttagtagagacggggcttcaccgtgttggccaggatggtctcgatctcctgacctcgtgatctgcccgccttggcctcccaaagtgctgggattacaggcgtgagccaccgcg

SEQ ID NO: 4549 - DNA, 273 bp, Homo sapiens
  misc_feature 1..273: note = U/M: U (0.15:0.84) in Epidermal Keratinocytes
  misc_feature 1..273: note = source = chr7:40938603-40938875; Gene: C7orf10 (Intergenic)
  source 1..273: mol_type = genomic DNA
cgtccggctcttaggcattgttattccttcttccccaactgtggcctccaagccactcttgtagaaccccccagagctctgagggtcccagtgggagaacctctgataggagggaaggagtgagagagtgccctgctgctcttcctctcgctttgctcccttaacttgtgctgtgcacagctcttgacctttctgagaacagactggcatctctggccgcccgccctccttccctccctcctcaccaaccctgactggcagaggttctctgcg

SEQ ID NO: 4550 - DNA, 420 bp, Homo sapiens
  misc_feature 1..420: note = U/M: U (0.23:0.92) in Epidermal Keratinocytes
  misc_feature 1..420: note = source = chr5:16820219-16820638; Gene: MYO10 (intron)
  source 1..420: mol_type = genomic DNA
cgcacccagaaggcacaaggacattcaagagtgaagaaacatgtagacccttcattttaagtcatcaacaccatggaagaaagttaagaaacagaaacttaggccagagtcaaagcagccttggggcaacctagaaattcccagaagttaaatagctagaatgccctgccttcccctagcacgccacatccccatgatgccaatccaggcacattttcagaagagctacaaccagacaggtacttgcgtcttccaaagaaaagtgccgaccagggtggggcagaaacagaacttgcctgctggtcaactctcggccaaccaagtagtataaagtagggcccatgccacctgccagctcccggcacacacctgaggtctcatctcactctgctgactcaaggctcctgccagcgcaactcg

SEQ ID NO: 4551 - DNA, 39 bp, Homo sapiens
  misc_feature 1..39: note = U/M: U (0.16:0.84) in Epidermal Keratinocytes
  misc_feature 1..39: note = source = chr22:48605276-48605314; Gene: MIR3201 (Intergenic)
  source 1..39: mol_type = genomic DNA
cggggcaccggagaagcgccacgtccatcctgacacccg

SEQ ID NO: 4552 - DNA, 86 bp, Homo sapiens
  misc_feature 1..86: note = U/M: U (0.2:0.88) in Epidermal Keratinocytes
  misc_feature 1..86: note = source = chr7:126298920-126299005; Gene: GRM8 (intron)
  source 1..86: mol_type = genomic DNA
cgcgcggctaggggaccgagccactcacagacatcaaggaggatgccgtaaagagtcacagaggccgcagccttgacaagcggccg

SEQ ID NO: 4553 - DNA, 212 bp, Homo sapiens
  misc_feature 1..212: note = U/M: U (0.26:0.94) in Epidermal Keratinocytes
  misc_feature 1..212: note = source = chr17:639372-639583; Gene: FAM57A (intron)
  source 1..212: mol_type = genomic DNA
cgcctccgtagactgtatttccagtgttgcagttcagcggactggctgcgtccgaaatcagagacaaagttaatacagatttcagggccctcggcttacaatttagaatctctggggactggagcgcttaacaagcactgcaggtgattctgatgttcaggtagtttgagaaccataaaacgaaatggttttctacctaatacgtggatgcg

SEQ ID NO: 4554 - DNA, 262 bp, Homo sapiens
  misc_feature 1..262: note = U/M: U (0.18:0.86) in Epidermal Keratinocytes
  misc_feature 1..262: note = source = chr16:54244135-54244396; Gene: IRX3 (Intergenic)
  source 1..262: mol_type = genomic DNA
cgcttgaaactgggaggtggaggttgcagtgagctgctatcgcagcattgtgctctagcctgaatgacagagtaagactccgtctcaaaaaaaaaaaaaaaaaaatcacttgattgccttgtggagaatggactgaggtgggtgaaagtagaagcagggagactgaccaggaggctctcgggaggatctcccgcatgtccaggctgagtgctgctggcttggtgcggcagtggtcttcagaagtgagccaattcaggatgcg

SEQ ID NO: 4555 - DNA, 306 bp, Homo sapiens
  misc_feature 1..306: note = U/M: U (0.19:0.87) in Epidermal Keratinocytes
  misc_feature 1..306: note = source = chr10:99239715-99240020; Gene: MMS19 (intron)
  source 1..306: mol_type = genomic DNA
cgcaacctttgatatgcaaatgaaatccattagaaactgggtccacccaaatatggcgattcccatggcgttcctgccctttccccaccttcctggcaacatggctgcccccatgtatccccacatgtgtagaatatcatggtgccctgcatttgcatattaaaaggctcgggtaggagggccagcttttttgccggctatgtgaatgacatgcctagtcaaaccaatcccccgagccctatgcaaatcagacaccgcctcctccagcttctggatatattacctagctggtatctgtggcaggcg

SEQ ID NO: 4556 - DNA, 331 bp, Homo sapiens
  misc_feature 1..331: note = U/M: U (0.23:0.91) in Epidermal Keratinocytes
  misc_feature 1..331: note = source = chr8:119044608-119044938; Gene: EXT1 (intron)
  source 1..331: mol_type = genomic DNA
cgaggcatttgagaaccactgttttagaacaataaagatttttttcagggtctgtgctaattttcatgactctctaatataatctagtgtctttaaaataccatcaaagcttcacagtgtctttcacagagggtaacaactttttttttttttttttttgagacagagtttcgctctcgttgcccaggctggagtgcaatggcaggatctcggctgactgcatcctccgcctcccaggttcaggcaattcatctgcctcagcctcctgagtagctgggattacagacatgtgccaccacgcccagctaattttgtatttttagtagggacg

SEQ ID NO: 4557 - DNA, 160 bp, Homo sapiens
  misc_feature 1..160: note = U/M: U (0.24:0.91) in Epidermal Keratinocytes
  misc_feature 1..160: note = source = chr1:245786057-245786216; Gene: KIF26B (intron)
  source 1..160: mol_type = genomic DNA
cgcctggaaagatagggatccagaggcctggaggagcagcattccgctgctgcctgggattgaggcggggggaagggagacagccaaggagtgggtgatgtacccagagacacgcctctctggaagagtggggcctggggcaaaaaggcggccttctccg

SEQ ID NO: 4558 - DNA, 268 bp, Homo sapiens
  misc_feature 1..268: note = U/M: U (0.26:0.93) in Epidermal Keratinocytes
  misc_feature 1..268: note = source = chr1:205573469-205573736; Gene: ELK4 (Intergenic)
  source 1..268: mol_type = genomic DNA
cgacacgatctgatttacatatctaaagtatcactggttactatggaaaagagactatggggcaagcatggaattgggaagaccacctgggtaccactgcaatagactgaagaaataatggtggcttggaaatgtagatagcaacggaagtggtgaaagtgattggattcaagcaatattttgaaggtgaaactgacaatttgctgatggattgggtgtagtgtgagaaagataagaatcaaggatgggccgggaacggtggctcacg

SEQ ID NO: 4559 - DNA, 197 bp, Homo sapiens
  misc_feature 1..197: note = U/M: U (0.2:0.86) in Epidermal Keratinocytes
  misc_feature 1..197: note = source = chr11:125276308-125276504; Gene: PKNOX2 (intron)
  source 1..197: mol_type = genomic DNA
cgtgcgcaaccccagctgaaccccttccattgctacgtaaagaactcaagtggcttgaaggcttctaggacaggtttttaaatcccaactgtacgactccctagttgagtgaccttagccaagggaagtgggaaataaattattggatggctaaatgtgccaggcactgtgcttgcattggagcctgtctgaccccg

SEQ ID NO: 4560 - DNA, 468 bp, Homo sapiens
  misc_feature 1..468: note = U/M: U (0.24:0.9) in Epidermal Keratinocytes
  misc_feature 1..468: note = source = chr17:72415128-72415595; Gene: GPRC5C (Intergenic)
  source 1..468: mol_type = genomic DNA
cgctttgtgtgcagctaaccaaggcttctcacagcaagcctccccaccaaggattccatactcaggccgggcgcggtggctcacgcctgtaatcccagcactttgggaggccgaggcgggcggatcacgaggtcaggagatcgagaccatcccggctaaaacggtgaaaccccgtctctactaaaaatacaaaaaattagccgggcgtagtggcgggcgcctgtagtcccagctactggggaggctgaggcaggagaatggcgtgaacccgggaggcggagcttgcagtgagccgagatcccgccactgcactccagcctgggcaacagagcgagactccgtctcaaaaaaaaaaaaaaaaaaaaaaaaggattccatgctctctgactctcactgcttctctccccatcaaacctcctttcccaggagttggtttaatcgtattgccatcctaccacacacaatccg

SEQ ID NO: 4561 - DNA, 199 bp, Homo sapiens
  misc_feature 1..199: note = U/M: U (0.18:0.82) in Epidermal Keratinocytes
  misc_feature 1..199: note = source = chr20:60306851-60307049; Gene: CDH4 (intron)
  source 1..199: mol_type = genomic DNA
cgggggtgcggctgttcctccacccgactgtcacccccacgaggactcgggggctgcacagcctggcggggatgcctctactggagggtgtgtcccctgggatgagcaacatcagaacccaggttgccccacctgcacggtccccctacccacccactccccttaggagattctccttcatcaagaacctgagccagcg

SEQ ID NO: 4562 - DNA, 182 bp, Homo sapiens
  misc_feature 1..182: note = U/M: U (0.27:0.9) in Epidermal Keratinocytes
  misc_feature 1..182: note = source = chr1:53995480-53995661; Gene: GLIS1 (exon)
  source 1..182: mol_type = genomic DNA
cgctggtgcttggcgcggtcgctggagttgctgaaggccttctggcaacccgggtgctggcacaggtacggcttctcgcccgtgtggctcctcaggtggatcttgaggttctccagccgtgagaaggccttgctgcagccttcaaactgcaggagaggctggtgaggggaactcccagcccg

SEQ ID NO: 4563 - DNA, 166 bp, Homo sapiens
  misc_feature 1..166: note = U/M: U (0.31:0.93) in Epidermal Keratinocytes
  misc_feature 1..166: note = source = chr16:23495499-23495664; Gene: GGA2 (intron)
  source 1..166: mol_type = genomic DNA
cgggtggatcacctgaggtcaggagttcgagaccagcctaaccaacatagagaaaccctgtctctacttaaaaaaaaaaaaaaatacagaattagccaggcgtgctggcacattcctgtaatcccagctcctcgggaggctgaggcaggagaatcgctcgaacccg

SEQ ID NO: 4564 - DNA, 322 bp, Homo sapiens
  misc_feature 1..322: note = U/M: U (0.3:0.92) in Epidermal Keratinocytes
  misc_feature 1..322: note = source = chr19:46787721-46788042; Gene: RNU6-66 (intron)
  source 1..322: mol_type = genomic DNA
cgcctcccgggttcaagtgattctcctgcctcagcctcctaagtagcagggattacaggtgtacaccaccacccctggctaatttttgtatttttagtagagacagggtttcgccatgttggccaggctggtctcaaactcctgaccttgtgatccacctgctgcggcctcccaaagtgctgggattacaggcatgagcccacacccagcccagcactcacattttattaaaggcagctgctcttctttaaagaaccccagtgtgtacaggtgtcagtatcagtcactatcggcaccaacatgcgtccacgtgccgtcatcg

SEQ ID NO: 4565 - DNA, 398 bp, Homo sapiens
  misc_feature 1..398: note = U/M: U (0.3:0.92) in Epidermal Keratinocytes
  misc_feature 1..398: note = source = chr15:50945080-50945477; Gene: TRPM7 (intron)
  source 1..398: mol_type = genomic DNA
cgggcacactggctcgtgcctgtaatcccagcactttgagaggccaaagtggaaggatcacttgagctcaggagtcaagaccagcctgacaacatggcaaaactccttctctacaaaaattagccaggcatggtggcatgcacctgtggtcacagttacttgggaagctaaagggaaaagatcacctgagcccgggaggtcaagtctgcagtgactgtgacactgcactccagtctgggccacagagtgagaccctgtttccccactccccccaaaaagaaaaaagaaacggacgtggtggctcacacctgcaatcccagctcttaaggaggcataagtgggagcatagcttgagccgaggacttcaaaacttgccttggcaatatagtgagaccccg

SEQ ID NO: 4566 - DNA, 128 bp, Homo sapiens
  misc_feature 1..128: note = U/M: U (0.31:0.92) in Epidermal Keratinocytes
  misc_feature 1..128: note = source = chr12:6475764-6475891; Gene: SCNN1A (intron)
  source 1..128: mol_type = genomic DNA
cgagaccagactgaccaacatggagaaaccctgtctctactaaaaatgcaaaattagccgggcgtggtggcacatgcctgtaatcccagctactcgggaggctgaggcaggagaatcgcttgaacccg

SEQ ID NO: 4567 - DNA, 134 bp, Homo sapiens
  misc_feature 1..134: note = U/M: U (0.31:0.92) in Epidermal Keratinocytes
  misc_feature 1..134: note = source = chr17:62938635-62938768; Gene: LRRC37A3 (Intergenic)
  source 1..134: mol_type = genomic DNA
cgtggtggcggtgcctgtagtcccagctactccggaggctgacgcaggaaaatcactttaacccgggaggcagaggctgcagtgagctgagattgtgccactgcactccagcctggcgacagagtgagactccg

SEQ ID NO: 4568 - DNA, 135 bp, Homo sapiens
  misc_feature 1..135: note = U/M: U (0.27:0.88) in Epidermal Keratinocytes
  misc_feature 1..135: note = source = chr13:24152430-24152564; Gene: TNFRSF19 (intron)
  source 1..135: mol_type = genomic DNA
cgtttaccaataagtcgttattgggatctatattctggatgtgttagatttgaaatatacaacctctatcaaggtgtgacatcgggaataatatttttaacattgttcacaagtacctagtatagtgctacgccg

SEQ ID NO: 4569 - DNA, 230 bp, Homo sapiens
  misc_feature 1..230: note = U/M: U (0.34:0.93) in Epidermal Keratinocytes
  misc_feature 1..230: note = source = chr21:40128349-40128578; Gene: LINC00114 (intron)
  source 1..230: mol_type = genomic DNA
cggagtctcgctctgtcgcccaggctggagtgcagtggcgcgatctcggctcactgcaagctccgcctcccgggttcacgccattttcctgcctcagcctgcccagtagctgggactacaggcgcctgccaccactcccggctaattttttttttgtattttttagtagagacggggtttcactgtgttagccaggatggtctcgatctcctgacctcgtgatccacccg

SEQ ID NO: 4570 - DNA, 17 bp, Homo sapiens
  misc_feature 1..17: note = U/M: U (0.3:0.88) in Epidermal Keratinocytes
  misc_feature 1..17: note = source = chr1:236266130-236266146; Gene: NID1 (Intergenic)
  source 1..17: mol_type = genomic DNA
cgcggtgacgggacgcg

SEQ ID NO: 4571 - DNA, 219 bp, Homo sapiens
  misc_feature 1..219: note = U/M: U (0.39:0.96) in Epidermal Keratinocytes
  misc_feature 1..219: note = source = chr17:79638116-79638334; Gene: CCDC137 (intron)
  source 1..219: mol_type = genomic DNA
cgtgccgctgcactccagcctggtgacagagcgagactccatctcaaaaaaaagaaaaaaaaaaaaaagctttgaaggtttgagaggttgctttcagctctgtagattccctgtttctggattgttgtattacttatagttaccttagccagtgaaagttcatcacagagaacgtggcccagatacagcctggcgccacggtgatctccagagctgtcg

SEQ ID NO: 4572 - DNA, 405 bp, Homo sapiens
  misc_feature 1..405: note = U/M: U (0.36:0.92) in Epidermal Keratinocytes
  misc_feature 1..405: note = source = chr12:699039-699443; Gene: NINJ2 (intron)
  source 1..405: mol_type = genomic DNA
cgtggggtgaggcagatgggctgctgtggcagccgtctcagagagggcggggtctccctgtcaggacccaaggggtcctagggtacaggtggaaggcagaggtggagcggtgtggggcagcggatcagggaggggctgatgaggcacttaggctttgtcctgagggcagcagggagcagtaggaaggttatccgcagccagtggcatccttagagcagcgtcttattttttattttcgttattttctgtagagacggtgtcttgctatattgcacaggctggtctggaatcctggtcccaaacaagtggtcctcctgcctcagcctcccaatgtgctgtagcagcattttagcaggaccatgatggaagcggctcgaaggatgggctggagcggagagccacgcg

SEQ ID NO: 4573 - DNA, 247 bp, Homo sapiens
  misc_feature 1..247: note = U/M: U (0.39:0.91) in Epidermal Keratinocytes
  misc_feature 1..247: note = source = chr11:6268007-6268253; Gene: CNGA4 (Intergenic)
  source 1..247: mol_type = genomic DNA
cggtggctcacgcctgtaatcccagcactttgggaggccaagacgggcggatcacgaggtcaggagatcgagaccatcctggctaacatggtgaaaccctgaatacaaaaaaaaaaaattagctgggcatggtcgcgggcacctgtagtcccagctactggggaggctgactcaggagaatggcgtgaacccgggaggcggagcttgcagtgagccaagatcgcgccactgcactctagcctgggcg

SEQ ID NO: 4574 - DNA, 109 bp, Homo sapiens
  misc_feature 1..109: note = U/M: U (0.08:0.92) in Epidermal Keratinocytes
  misc_feature 1..109: note = source = chr10:8302733-8302841; Gene: GATA3 (Intergenic)
  source 1..109: mol_type = genomic DNA
cgtcagagacctccgcgcaattggcagcatcttctgcgtgtagctacaggtccctgagagagaccggcgcgcctctcccacaggggcgatcctccctccgcacccttgc

SEQ ID NO: 4575 - DNA, 133 bp, Homo sapiens
  misc_feature 1..133: note = U/M: U (0.13:0.88) in Epidermal Keratinocytes
  misc_feature 1..133: note = source = chrX:153057388-153057520; Gene: IDH3G (intron)
  source 1..133: mol_type = genomic DNA
cggtcgggacttttctgtcttctctctagcgcttatcaacgggtcgggacttttctgtcttctctctagcgcttatcaacatctgaaatcatcttatttgggggctcttgtaagcacgcagaaagcggcttcg

SEQ ID NO: 4576 - DNA, 192 bp, Homo sapiens
  misc_feature 1..192: note = U/M: U (0.14:0.87) in Epidermal Keratinocytes
  misc_feature 1..192: note = source = chr6:71602829-71603020; Gene: B3GAT2 (intron)
  source 1..192: mol_type = genomic DNA
cgctgtgcccctcagatgactcctggtattcttcgtcctctggctccctcagatttatagtattgtcagaataaaagtgatgaatccagttcagaagacagcctccatcccatcagaattctgaacgcggagatcttgactacggctgggaaatatgcacagaagatggggcaagcacaggctggcagcccg

SEQ ID NO: 4577 - DNA, 193 bp, Homo sapiens
  misc_feature 1..193: note = U/M: U (0.21:0.91) in Epidermal Keratinocytes
  misc_feature 1..193: note = source = chr20:50884577-50884769; Gene: ZFP64 (Intergenic)
  source 1..193: mol_type = genomic DNA
cggcttcctaaagtgctgggattacaggcgtgagccgctgcgcctggcccagtaagccttttcaaagaattctgtgcaggttacagcataatttaattacaaatgaatatgcattcttagatataaaaatgagagatgtctgagtatgataactaagatagacagtgttagaacatcatgatttgaaggatcg

SEQ ID NO: 4578 - DNA, 125 bp, Homo sapiens
  misc_feature 1..125: note = U/M: U (0.05:0.92) in Epidermal Keratinocytes
  misc_feature 1..125: note = source = chr8:71185517-71185641; Gene: NCOA2 (intron)
  source 1..125: mol_type = genomic DNA
cgtgtgtgtgcacctaatctcagctggttcccccgagaccccctgagcaccaaccctagtcccccgcgcagccccttatccgctgcgacaagatgaaagaaacaatcatgaaccaggaaaaactc

SEQ ID NO: 4579 - DNA, 200 bp, Homo sapiens
  misc_feature 1..200: note = U/M: U (0.18:0.92) in Epidermal Keratinocytes
  misc_feature 1..200: note = source = chr1:236044087-236044286; Gene: LYST (Intergenic)
  source 1..200: mol_type = genomic DNA
cgcaaatgggaagaacaagtattgctgcattttttcctttaaagaattccatttagcggccgggcacggtggctcacacctgtaatcccagcactttgggaggctgaggtgggtggatcgccagaggtccggagttcaagaccagcctaaccaacatggtgaaaccccatctctacaaaaaataaaaaaattagccgggc

SEQ ID NO: 4580 - DNA, 148 bp, Homo sapiens
  misc_feature 1..148: note = U/M: U (0.07:0.92) in Epidermal Keratinocytes
  misc_feature 1..148: note = source = chr16:1017921-1018068; Gene: LMF1 (intron)
  source 1..148: mol_type = genomic DNA
cgcagtaatcacactagggacccgagtccacacgtcaggaagacaggtgtgtcttcaactctgagccctgtgaaaatgccgctttccgctaacacactccggctcccacagcacagcagggcatgcccgacaccccaggacgcccgcg

SEQ ID NO: 4581 - DNA, 129 bp, Homo sapiens
  misc_feature 1..129: note = U/M: U (0.05:0.87) in Epidermal Keratinocytes
  misc_feature 1..129: note = source = chr2:9960715-9960843; Gene: TAF1B (Intergenic)
  source 1..129: mol_type = genomic DNA
cgcacagtacatacggctcatggcatttcagggagcggcaagccagttgctgccaacccgcccgatgactgtgtctaaggcggaatctggaagcctctctgagcctccgtctccctcactgtcccctcg

SEQ ID NO: 4582 - DNA, 297 bp, Homo sapiens
  misc_feature 1..297: note = U/M: U (0.09:0.9) in Epidermal Keratinocytes
  misc_feature 1..297: note = source = chr6:12185473-12185769; Gene: EDN1 (Intergenic)
  source 1..297: mol_type = genomic DNA
cgttcacccagattgacagcagtggtcttgctgggtggagggaacagtagagttcagggccactgacgcagctataatttttgaagaggcatatccagagaggaaaaagctgcacggaagcgtagctctagaaatctgcatataggttcttttgagtcattggcatgcacatgtgaaactccatgatttctggcagagaagggctataagaggctctgagttgaactgggacactgcaggttccacagtgctgaggggcactggcgttctgacctggcagagtggagtcatttcacg

SEQ ID NO: 4583 - DNA, 146 bp, Homo sapiens
  misc_feature 1..146: note = U/M: U (0.12:0.91) in Epidermal Keratinocytes
  misc_feature 1..146: note = source = chr8:144203483-144203628; Gene: LY6H (Intergenic)
  source 1..146: mol_type = genomic DNA
cgcacagctgaaaggagtctggaccagacagctctgtccgcagtcagaactgagggtaagcgcggtcctgtgcacaagtcagcaaaccggagagccagggtgccaggcactgaccccattctatagccatagaatcaaggctcacg

SEQ ID NO: 4584 - DNA, 336 bp, Homo sapiens
  misc_feature 1..336: note = U/M: U (0.11:0.89) in Epidermal Keratinocytes
  misc_feature 1..336: note = source = chr4:122144251-122144586; Gene: TNIP3 (intron)
  source 1..336: mol_type = genomic DNA
cgcccagccaggtgtgtttgtttttatgagaatatgcttcaggtgaaactagtaacggatcgctttcatatccattacaggtgtgccagccttggcccatccttagcctcctgctaactgtatcagttcctccaggcagatgctcacccgcttgaaagggaagtaaaggacagcctgagccaatttatcagatatctttgcataccaggattttgttctgaagtaataaattttgttttataactatgcattaattttgaatgcagtttagcaagcaatgaccaaacttaaacctggtcttgtacaaaaacaattcaaactttaatgctggattcg

SEQ ID NO: 4585 - DNA, 76 bp, Homo sapiens
  misc_feature 1..76: note = U/M: U (0.15:0.92) in Epidermal Keratinocytes
  misc_feature 1..76: note = source = chr9:34659141-34659216; Gene: IL11RA (intron)
  source 1..76: mol_type = genomic DNA
cgaactcatgacctcacgatctgcccacctcggcctcccaaagtgctgggattacaggtgtgagccacggcgcccg

SEQ ID NO: 4586 - DNA, 205 bp, Homo sapiens
  misc_feature 1..205: note = U/M: U (0.13:0.88) in Epidermal Keratinocytes
  misc_feature 1..205: note = source = chr7:54866720-54866924; Gene: SEC61G (Intergenic)
  source 1..205: mol_type = genomic DNA
cggagaggcgaaagtgagatgaggaggaaggagggaaatgcctctgacaaatacagccaattaaaaagtaccgtgattctaagccacagcacgctctgtctggtctggcctcgcctggagttcttctgcacccacaccgaacccagctgctcccctcactccccaccatcctgcgtctcctcacacagcccagtggaatccagcg

SEQ ID NO: 4587 - DNA, 383 bp, Homo sapiens
  misc_feature 1..383: note = U/M: U (0.13:0.88) in Epidermal Keratinocytes
  misc_feature 1..383: note = source = chr21:46169568-46169950; Gene: TSPEAR (Intergenic)
  source 1..383: mol_type = genomic DNA
cgctgcttccttgctcctaacctttgcttccagggtccaggtccctgacaccctctgaagccggcgaggtctccccgtccctgcctgtgggccacgtccaaggctgtgagctgactgcggaattcttggcctttccttgcagttactcaaatttcactccttctgggctggtccaggagaccccagcttgggacagggcctgtggcccctccagcagcacgcactgtgcccacccgccactggtgaggagattccaggagaaacactgccacccaagcagcaccccacatggctggcctccccgcaccgggccggcaccccacagtgccagtcacccaccccacttggctggcctctctacaccgggccggcaccccacagcg

SEQ ID NO: 4588 - DNA, 49 bp, Homo sapiens
  misc_feature 1..49: note = U/M: U (0.21:0.93) in Epidermal Keratinocytes
  misc_feature 1..49: note = source = chr6:10115299-10115347; Gene: LOC100130275 (Intergenic)
  source 1..49: mol_type = genomic DNA
cggagtctcgttctgtcgcccaggcgggagtgctgtggcgcgatctccg

SEQ ID NO: 4589 - DNA, 112 bp, Homo sapiens
  misc_feature 1..112: note = U/M: U (0.25:0.94) in Epidermal Keratinocytes
  misc_feature 1..112: note = source = chr14:24241129-24241240; Gene: DHRS2 (Intergenic)
  source 1..112: mol_type = genomic DNA
cgctttaaggagttcagaaaagttcatgctcagatttaaattttagttattttattttattttaatgagattgcgtttcactctgtcgccaaggctggagtacagtggcgcg

SEQ ID NO: 4590 - DNA, 84 bp, Homo sapiens
  misc_feature 1..84: note = U/M: U (0.22:0.9) in Epidermal Keratinocytes
  misc_feature 1..84: note = source = chr8:144203694-144203777; Gene: LY6H (Intergenic)
  source 1..84: mol_type = genomic DNA
cgggagaagagtggggaaggagccgactcaaggctgagtcccgcagccccgtgagggcggagtggaggttacggggcgggagcg

SEQ ID NO: 4591 - DNA, 146 bp, Homo sapiens
  misc_feature 1..146: note = U/M: U (0.23:0.91) in Epidermal Keratinocytes
  misc_feature 1..146: note = source = chr11:60515803-60515948; Gene: MS4A15 (Intergenic)
  source 1..146: mol_type = genomic DNA
cgaatagcaaggatttcacatgaatatgtgtgaactcagtagagttggctgcgggagaacagaggcagccgggagcgagcggcagcacagcagcggtggcagcccggtgagtaccctccgcccttccaggggggcagtcaaggccg

SEQ ID NO: 4592 - DNA, 269 bp, Homo sapiens
  misc_feature 1..269: note = U/M: U (0.22:0.9) in Epidermal Keratinocytes
  misc_feature 1..269: note = source = chr16:88709751-88710019; Gene: CYBA,CYBA (TTS,exon)
  source 1..269: mol_type = genomic DNA
cggggcgaggtcacacgacctcgtcggtcaccgggatggggttgacctggggacctcccgggggtccccccgccgccaccgcagcctcctcctcgctgggcttcttgcgggcctcggccgggggccgcggcggggggttgctgggcggctgcttgatggtgcctccgatctgcggccgctcccggggcttgggctcgatgggcgtccactgctcgccacgcacagccgcctgcggggcactgaagggttgagccgcgccccagcgcccg

SEQ ID NO: 4593 - DNA, 468 bp, Homo sapiens
  misc_feature 1..468: note = U/M: U (0.28:0.9) in Epidermal Keratinocytes
  misc_feature 1..468: note = source = chr17:60739758-60740225; Gene: MRC2 (intron)
  source 1..468: mol_type = genomic DNA
cgactcttgtcatcaaattgcttcaccaccctcagccaatttctttaccaataacatagcataatgctgatttatagtcttcttactgtgccagatcctgttccaaatgctttacatgtattatctcatttcatcgttaccagagtcttaagatgaggaaacggcatagagagatgaagcactttgcccaagtcccatattcagtggcagacctagaatcgaagcactagctgccgggcacggtggctcatgcctgtaatcccagcactttgggagaccaaggtgggcggatcacccgaggttgggagtttgagaccaccctgaccaacatggagaaatctcatctctactaaaaatacaaaaaaattagccaggtgtggtggtgcatgcctgtaatcccagctactcaggaggctgaggcagaattgcttgaacccaggaggcagaggttgcagtgagccgagatcg

SEQ ID NO: 4594 - DNA, 449 bp, Homo sapiens
  misc_feature 1..449: note = U/M: U (0.34:0.93) in Epidermal Keratinocytes
  misc_feature 1..449: note = source = chr1:2522399-2522847; Gene: FAM213B (exon)
  source 1..449: mol_type = genomic DNA
cgtgggccgcacagcgcggcagggccttggctaccacacgcggcatcgctccttggggtgcatgggggtgccccgggcacagtggaacgtgtctgcgaaggcggccaggttctgcagcgaccccagtaccctgtgggtgggtgggtgtgacagcaggagcattgccatcttggacaaacatggccattttaagttctccgtgattaaaaaccagcccaaaacatcagcctaatggctcatgtcagtatgagcagaaacatttcaaccatgagataaacccccatctgaccagaaacatgccaatcctgagaataacctcccctccagccagagatattccaactctgcaataaaactctccttcacacagaaacattcgcagcctgcggtaggctcccccttcctaaacccttaaatgcccttagtctgtaagagaatgtccctgaccg

SEQ ID NO: 4595 - DNA, 339 bp, Homo sapiens
  misc_feature 1..339: note = U/M: U (0.35:0.92) in Epidermal Keratinocytes
  misc_feature 1..339: note = source = chr3:179182829-179183167; Gene: GNB4 (Intergenic)
  source 1..339: mol_type = genomic DNA
cgatatacttccaaagagcagttgaagaaacatacaattcttgcagatattgtaatatctgctgcaggtattccaaatctgatcacagcagatatgatcaaggaagaagcagcagtcactgatatgggaataaatagagttcatgatcctgtaactgccaaactgaagttggttggagatgtggattttgaaggagtcagacaaaaagccggttatatcactccagttcctggaggtgttggccccatgacagtggcaatgctaatgaagaataccattatggccgggcgcggtggctcacacctgtaatcccagcactttgggaggccgaggcgggcg

SEQ ID NO: 4596 - DNA, 85 bp, Homo sapiens
  misc_feature 1..85: note = U/M: M (0.96:0.11) in Epidermal Keratinocytes
  misc_feature 1..85: note = source = chr17:18345569-18345653; Gene: KRT16P1,KRT16P1 (exon,intron)
  source 1..85: mol_type = genomic DNA
cgggagtaccagatcttgctggacatgaagacacggctggagcaggagatcgccacctaccgccacctgctggagggcgaggacg

SEQ ID NO: 4597 - DNA, 266 bp, Homo sapiens
  misc_feature 1..266: note = U/M: M (0.69:0.12) in Epidermal Keratinocytes
  misc_feature 1..266: note = source = chr12:54384175-54384440; Gene: HOXC10 (TTS)
  source 1..266: mol_type = genomic DNA
cgtctcttggcgggtttaatgtaagtgagagaccataacgttgatttaaatattatccaggtgaccacaataagtcaaggtcataaaacagtaatgtcaggacggtcttggtgcgcgcgagaggtggattttatgatctgcaaatataatgtggtgctgcagtaaaagatgcatttaaaggtgactggaggagggaaagaggcagagagcaagctgcaatcttgaggagcagacggatctgattgcctggggtgctgggctgggcg

SEQ ID NO: 4598 - DNA, 240 bp, Homo sapiens
  misc_feature 1..240: note = U/M: M (0.9:0.37) in Epidermal Keratinocytes
  misc_feature 1..240: note = source = chrX:152950260-152950499; Gene: SLC6A8 (Intergenic)
  source 1..240: mol_type = genomic DNA
cggctagcccccctcccctgccctccccccagctccccttctcctcccctctccctcctcctcagctcctactccaaccccccagccccagctggggcctgaaaggctgcccactccctgggacacggtaaggggagggtgcagctctccccccgcccctccccggtcgcctctgccccagagaacagtttgcttctcacccagaagccaccataggagctctgggctgggcacaggtcg

SEQ ID NO: 4599 - DNA, 127 bp, Homo sapiens
  misc_feature 1..127: note = U/M: M (0.86:0.18) in Epidermal Keratinocytes
  misc_feature 1..127: note = source = chr7:27225772-27225898; Gene: HOXA11 (promoter-TSS)
  source 1..127: mol_type = genomic DNA
cggtccacccatctgcctggtcttctggagctgaggactcgggaaaccatgcaattgaggcaagccttgggctgctttagaggcgctgacatccgaggagacttctcctgggtatgctgcatcttcg

SEQ ID NO: 4600 - DNA, 353 bp, Homo sapiens
  misc_feature 1..353: note = U/M: M (0.88:0.09) in Epidermal Keratinocytes
  misc_feature 1..353: note = source = chr10:119294251-119294603; Gene: EMX2OS (intron)
  source 1..353: mol_type = genomic DNA
cgcggtcgggcctctccgggtccacgccaggggtgggaggacacttcgggcccagcgtagaggaggcctccgaggcccaagcgggcttcggctgctgcgagtccccagaggctccctcgggcctcactcgcggtgtctcctccagacgccaggggcaggccacgaagccgagggctccgcgtggccgtgggagaagcggggtgcacggagccttcccgcgcccagacgccgaggggatgcaaacaggggagccgggcctggtatggccaacctccaggatcgaggggccccagaatgtgcgtgtggccgggggcgggggcagctgcgggggccagaactagagtattccttcg

SEQ ID NO: 4601 - DNA, 100 bp, Homo sapiens
  misc_feature 1..100: note = U/M: M (0.9:0.12) in Epidermal Keratinocytes
  misc_feature 1..100: note = source = chr19:52223109-52223208; Gene: HAS1 (intron)
  source 1..100: mol_type = genomic DNA
cggagcagcggcaggctgcaggagtgggcttgggcgcgtcctgctgggagcgagaggggaaaggaaggggcatgagtcccgggcgcatgagcctcctccg

SEQ ID NO: 4602 - DNA, 443 bp, Homo sapiens
  misc_feature 1..443: note = U/M: M (0.9:0.12) in Epidermal Keratinocytes
  misc_feature 1..443: note = source = chr5:3602865-3603307; Gene: IRX1 (Intergenic)
  source 1..443: mol_type = genomic DNA
cgcgttaggactaggaggtgccagtccacggctcctacccgctcccgacgcccgcatccttctacagccctccaccccgttcctggtccctgtagaggggaaggtcctctccctgccccgaggcgggaggaaaagcggcgaagaggaggctcgaagggcgccgcgtagggcaagtgggccgaggacaccgggggcgcgtcggggagcggggagtgggcggggtgggatgaggcagggaggagccgggccggagcggagtggagtggaccgcgggcggacggactcgggccgggccccggggagcagctccgcagtcggaatggacgtgctccaggcgccctctatggtccgaaagcggaatgcggccttgagcagcgcccatctcgctcctggggtgtgggggcaactctgggggcgctgggccttggggctccgtgggcacg

SEQ ID NO: 4603 - DNA, 361 bp, Homo sapiens
  misc_feature 1..361: note = U/M: M (0.92:0.15) in Epidermal Keratinocytes
  misc_feature 1..361: note = source = chr12:54360064-54360424; Gene: HOTAIR (intron)
  source 1..361: mol_type = genomic DNA
cgccgccgtctgtaactctgggctccctctctccactccccactcccctactgcaggcttctaaatccgttccattccactgcgaagcggagcaggacctaagaattggagagaaaattaaacgtcataaagaaaagttcatttacagcttaaatgtctgaatgttacggtttccttcagaaaacaaggcggtacactcggtaaggagaagtgaggcagcaggggtggggagggctggtgcggtaggaggcttggttttatttctttctcagatccagaggcggaaagaaagggggagaagcaggaaagtgcgacagaagcgttttacccgggcagctagcaaagaaagatgctgcagtcg

SEQ ID NO: 4604 - DNA, 262 bp, Homo sapiens
  misc_feature 1..262: note = U/M: M (0.83:0.11) in Epidermal Keratinocytes
  misc_feature 1..262: note = source = chr12:54345855-54346116; Gene: HOXC12 (Intergenic)
  source 1..262: mol_type = genomic DNA
cgtgtgtcgcggggttccttaaccacaaacggagcctcggtggtgcaccggaaggctggacgcttagattacctgggtccttgccagagtcctgaaaacccctaggttcccggtgggtctcagggagcaggacaccggggatgcgaattttgctagtggttgtcgacagctctccctgagaggaatcagggtcagctgcaaagaagaaagaggggtttgtgcgtgcttctttgcccgccgaatccaaaacctggggaaaacg

SEQ ID NO: 4605 - DNA, 313 bp, Homo sapiens
  misc_feature 1..313: note = U/M: M (0.75:0.03) in Epidermal Keratinocytes
  misc_feature 1..313: note = source = chr1:209849084-209849396; Gene: G0S2 (exon)
  source 1..313: mol_type = genomic DNA
cgcaaggggaagatggtgaagctgtacgtgctgggcagcgtgctggccctcttcggcgtggtgctcggcctgatggagactgtgtgcagccccttcacggccgccagacgtctgcgggaccaggaggcagccgtggcggagctgcaggccgccctggagcgacaggctctccagaagcaagccctgcaggagaaaggcaagcagcaggacacggtcctcggcggccgggccctgtccaaccggcagcacgcctcctaggaactgtgggagaccagcggagtgggagggagacgcagtagacagagacagaccg

SEQ ID NO: 4606 - DNA, 59 bp, Homo sapiens
  misc_feature 1..59: note = U/M: M (0.87:0.16) in Epidermal Keratinocytes
  misc_feature 1..59: note = source = chr5:134879183-134879241; Gene: NEUROG1 (Intergenic)
  source 1..59: mol_type = genomic DNA
cgagttaaagggggaggaaagcgcctcattttctatgcccccaagggacggaccgagcg

SEQ ID NO: 4607 - DNA, 100 bp, Homo sapiens
  misc_feature 1..100: note = U/M: M (0.77:0.07) in Epidermal Keratinocytes
  misc_feature 1..100: note = source = chr17:48049829-48049928; Gene: DLX4 (promoter-TSS)
  source 1..100: mol_type = genomic DNA
cgcctgagcagaggggcagcccgttacagtaggcgaggccagggcaaacccggggtcactatcagcgctgcgagactggtattcaaggtcctctcagccg

SEQ ID NO: 4608 - DNA, 226 bp, Homo sapiens
  misc_feature 1..226: note = U/M: M (0.79:0.1) in Epidermal Keratinocytes
  misc_feature 1..226: note = source = chr12:54354783-54355008; Gene: HOXC12 (Intergenic)
  source 1..226: mol_type = genomic DNA
cgccaatcctctctgcatggcacctggaggcgcggaaggttccggtgtaattcagcgggaggtggaaggcaggccccgatcccacagcgcgcctatgctcagcctttggtccgagcggccgccctcctgcgtgtgcctcggtccagacggcgctgccgattttccaaggagaggccgtggcccgcgtccgccgctgcaggactccccagcttcgccctccgctccg

SEQ ID NO: 4609 - DNA, 423 bp, Homo sapiens
  misc_feature 1..423: note = U/M: M (0.76:0.07) in Epidermal Keratinocytes
  misc_feature 1..423: note = source = chr12:54355009-54355431; Gene: HOTAIR (TTS)
  source 1..423: mol_type = genomic DNA
cgctgcagccctgcgcggtgctctcggttgccactctagccgaggcctcgagacaaagacgcgccgggcactggtggacgacccgggcgcctgggacactccctgactcgcgcctggagtgctcagcatcccggccctgtggcgaaggttgtgagaccttggtccaattccccgaccgtcgtggtcccggctgcggtcctctccagggtccagggagaggaaacccggcgcgcccacagccccggctgactcgagcagctcccgcgcccgacagcgccggcagctctggtctcctccggagggctgctgtgcccccgcgaaggacgagatgacccctgctggccggagctgtggaggttgcctcgccgagacccggatctgtccagtcgctcgtccctgagcaccctaggcgttggggggacg

SEQ ID NO: 4610 - DNA, 285 bp, Homo sapiens
  misc_feature 1..285: note = U/M: M (0.83:0.15) in Epidermal Keratinocytes
  misc_feature 1..285: note = source = chr12:54346155-54346439; Gene: HOXC12 (Intergenic)
  source 1..285: mol_type = genomic DNA
cgtgcctggaagaaggacgccttcacccaatcttcatttctcctgcgttgcatccgccgccctgtggccgctgctcctcacgctcagcggcctggcctgggagggcagcgagcagagctcccggcctgggagttgcctgctggggtggagggaatggggagaggctgagaccttcctcttggggtccctcttctaggagattggaattatctgggaagggaaaagagaatgaggagaatactccacccctcaaaggctagtgattatttggcaaagcccagctcg

SEQ ID NO: 4611 - DNA, 292 bp, Homo sapiens
  misc_feature 1..292: note = U/M: M (0.73:0.07) in Epidermal Keratinocytes
  misc_feature 1..292: note = source = chr17:48041265-48041556; Gene: DLX4 (Intergenic)
  source 1..292: mol_type = genomic DNA
cggctttcaccctgcacccggcgatgaagacgtcggcgaaacgcctactttccatgcctaggtctgggaaggtctgaagatcccggcggagctgccttcgttcggggccgggcaaattcgttgcagccgggttggcctcagggcctctcgccggctcgctatgtttccccggggcgccctggcaggccagccggcggtctgtcagtccagctcctggtgcgggcgcctcgttttggtccaccgggtccggggctgggacaccgagggaaaacttcagagctccgggccaccg

SEQ ID NO: 4612 - DNA, 337 bp, Homo sapiens
  misc_feature 1..337: note = U/M: M (0.8:0.14) in Epidermal Keratinocytes
  misc_feature 1..337: note = source = chr17:48041956-48042292; Gene: DLX4 (Intergenic)
  source 1..337: mol_type = genomic DNA
cgaagtggtgctgaccccaagacctctcccctcctcctcccccgggagcttctccagggttatttgggaaatgagggggaactccaatccctgagaaagcgctcaggggcttgctgaggtgagcgcaaatggaagcacaaggccgggctggccgtgggctcagtaaccagtcggctgcccggcttgcgccagcactaaatgctcgatcagaaagagaaaaagaggcgcaataattccaaatttcaggaaaagtcaaatcggagaggggggacgcaggtctcttcagactgcccattctccgggcctcgctgaatgcgggggctctatccacagcgcg

SEQ ID NO: 4613 - DNA, 339 bp, Homo sapiens
  misc_feature 1..339: note = U/M: M (0.75:0.12) in Epidermal Keratinocytes
  misc_feature 1..339: note = source = chr7:27225396-27225734; Gene: HOXA11 (promoter-TSS)
  source 1..339: mol_type = genomic DNA
cgcctctgcctccgaccctagccggaaccccttcggggccagagtttgaagccgtggatgtgcctgcctggtggcttgtccgatttgcacggtgacttgattacactctctcattcatggtcacttccgaagcgctttagtgccttccgtccctaaaccgccaacagccagaacggcttctccccgcggtttgtcactgatccgcagggcccggaagggccttcgtcttacccgggatccacctctcccctcatcttccctgcctacctcttcatcccaccttctgtccttggagaaactccctcctcctcgctgcctgccgggcttcggagtgactcg

SEQ ID NO: 4614 - DNA, 178 bp, Homo sapiens
  misc_feature 1..178: note = U/M: M (0.67:0.06) in Epidermal Keratinocytes
  misc_feature 1..178: note = source = chr2:219647056-219647233; Gene: CYP27A1,CYP27A1 (exon,intron)
  source 1..178: mol_type = genomic DNA
cggcggcggcaacggagcttagaggagattccacgtctaggacagctgcgcttcttctttcagctgttcgttcaaggctatgccctgcaactgcaccagttacaggtaacccgcgggggcatcgcgtcctggggatgggagtgggcaccggaacagagaggctagaggtgagaagacg

SEQ ID NO: 4615 - DNA, 393 bp, Homo sapiens
  misc_feature 1..393: note = U/M: M (0.68:0.11) in Epidermal Keratinocytes
  misc_feature 1..393: note = source = chr12:54345258-54345650; Gene: HOXC12 (Intergenic)
  source 1..393: mol_type = genomic DNA
cgtagattttataattaactcctttcgctgggctcagccgcagtggaggctgctaggatgcaggagggatggaggcacagagaaggtgtgagagaggcggcggggcatccagctggaggacgagctgagggacacaggctgccttggtcttcaaggaaagccttggaccacatccttgctttcagctttaattaaccccgagttaatgagcgaggcttagtagagcctggccagctgcggcgggagccagtggcccaggggccagcaggcaggccaccgctctagccttgtgatctgataaatgtacgggagagttcgcaccaatcgctccacggtttgggtgcctcggcctgaccacctatagttttgcgcatggtcagcgaagtgccggcg

SEQ ID NO: 4616 - DNA, 182 bp, Homo sapiens
  misc_feature 1..182: note = U/M: M (0.58:0.06) in Epidermal Keratinocytes
  misc_feature 1..182: note = source = chr12:54345660-54345841; Gene: HOXC12 (Intergenic)
  source 1..182: mol_type = genomic DNA
cggctagacacggctgccccgactccttgggatgcgagtccctcgcccagccccagcctgctcccggcgaacagctctcgccgaggctggatttagattttaagcgtctcacccgagcctcccgccggccccggggacccagactgggagctgcatttttgtccgagcccggttaaaaaacg

SEQ ID NO: 4617 - DNA, 322 bp, Homo sapiens
  misc_feature 1..322: note = U/M: M (0.58:0.06) in Epidermal Keratinocytes
  misc_feature 1..322: note = source = chr5:78281663-78281984; Gene: ARSB (promoter-TSS)
  source 1..322: mol_type = genomic DNA
cgtagtgtacacccatgaagccgcttcctccccactagcaaacaggaggccaaacacacagtctgattgcacggtgccctttggaaggtgcggttactttcaagttgccctgggaggatttggagtgttgcgtggtcattgaataaatagctcattcgcttgtccggatatgaccccactcagagctggctcccccactaagcagtgacactaagaagcacacagtatctagttagcctgaaatatctgagtggaaggaaaaaatcctttagtcacgtgcttattgaattaggaagttagccgtatgaccagtagattcccg

SEQ ID NO: 4618 - DNA, 371 bp, Homo sapiens
  misc_feature 1..371: note = U/M: M (0.57:0.12) in Epidermal Keratinocytes
  misc_feature 1..371: note = source = chr12:54383396-54383766; Gene: HOXC10 (exon)
  source 1..371: mol_type = genomic DNA
cgaagatgcttccacttaaagcatgagaaatggggtgccgggatgtggggtgtggtgtgtgccctcatagatgggggtgggagtgtggctggtgtgtgtgtcaagccctcactcacccacgcactcacacacagcattctgttctccatgcaaagttaagatcgaatccatccgcttgtaggggaaaaaaaggaaaaaaattaaccagagagggtctgtaatctcgcagagcacaggcagaatcgttccttccttgctgcatttcctccttagactaatagacgttttggaaagttcggctagtgttcgtgtgtttgtcgtagcacccagagcctccaccaaaccctctccatgtctttacctcccagtcg

SEQ ID NO: 4619 - DNA, 36 bp, Homo sapiens
  misc_feature 1..36: note = U/M: U (0.08:0.92) in Dermal Fibroblasts
  misc_feature 1..36: note = source = chr12:47298922-47298957; Gene: SLC38A4 (Intergenic)
  source 1..36: mol_type = genomic DNA
cgggcccgacatcaggtcgtgggggcaacgaagtcc

SEQ ID NO: 4620 - DNA, 141 bp, Homo sapiens
  misc_feature 1..141: note = U/M: U (0.07:0.91) in Dermal Fibroblasts
  misc_feature 1..141: note = source = chr11:104454814-104454954; Gene: CASP12 (Intergenic)
  source 1..141: mol_type = genomic DNA
cgaagtacaatcttacgggtacactccaacagaaaaaggaaaaaagcctcagatgggcatgtgtacaacttcctaaacacactgagcgtgctcacttcccaagggtaaggaggggtctgcgcatgcggcggcacaccctac

SEQ ID NO: 4621 - DNA, 144 bp, Homo sapiens
  misc_feature 1..144: note = U/M: U (0.07:0.9) in Dermal Fibroblasts
  misc_feature 1..144: note = source = chr15:50684234-50684377; Gene: MIR4712 (Intergenic)
  source 1..144: mol_type = genomic DNA
cgagactctgtctcaaaaaaaaaaaaaaaacccaagaagacagggttcagtgagctgtcagatagctcaacacacggaggctgtggagagtggcacacgcagagagggcatggaagctctgtgcctcttcatacctcgccctac

SEQ ID NO: 4622 - DNA, 71 bp, Homo sapiens
  misc_feature 1..71: note = U/M: U (0.05:0.88) in Dermal Fibroblasts
  misc_feature 1..71: note = source = chr13:68483269-68483339; Gene: PCDH9 (Intergenic)
  source 1..71: mol_type = genomic DNA
cgcgatggctcacgcctgtaatcccagcactttgggaggctgaggcaggcgaatcacaaggtcaggtgttc

SEQ ID NO: 4623 - DNA, 299 bp, Homo sapiens
  misc_feature 1..299: note = U/M: U (0.09:0.91) in Dermal Fibroblasts
  misc_feature 1..299: note = source = chr7:36650421-36650719; Gene: AOAH (intron)
  source 1..299: mol_type = genomic DNA
cgctttgacatcaccatgacaagaagacgctctggatagattgcccagccaagaaaaatgagagacacatggcacacacctgggcccagcctgaagcttggcgccaagaccaacatagctcaattgaaaacagctgatcccagaccaccccggacgcacgggtgagaagaaatgatggttgttttaagtcactggagatttggagtggttggtggttattattttgacaataacttggtgataaagcttcattttcagtatcaacatcctgagcaaaatggatctcttattcttgtccc

SEQ ID NO: 4624 - DNA, 389 bp, Homo sapiens
  misc_feature 1..389: note = U/M: U (0.05:0.87) in Dermal Fibroblasts
  misc_feature 1..389: note = source = chr3:169250875-169251263; Gene: MECOM (intron)
  source 1..389: mol_type = genomic DNA
cgatgccactgagtcatcaatttccactgtattatccaatgttctgcttggttggaatattaagcagccatcagattttgaacttcacgtttcctcacatttggcccttcactgatcaagctttgtttctctgtgattatagatatatatcagaccccggaatcaactttctttgttttatcaagacctggtgtgtagtaattctgatttatcatttttacaacagtctcttccctgcgggctccaggtcgtgatggtggcattgctacgatttatggtggggactgttgacggaaaatgtatggtctttttgattttccttctttccaacacctggttcttattttcccaactctagcttctgccattttaagcattatttaccattc

SEQ ID NO: 4625 - DNA, 123 bp, Homo sapiens
  misc_feature 1..123: note = U/M: U (0.11:0.89) in Dermal Fibroblasts
  misc_feature 1..123: note = source = chr12:51943598-51943720; Gene: SCN8A (Intergenic)
  source 1..123: mol_type = genomic DNA
cgtcatctgtatttacagctgctccccattatgtgagttactgcctgagctccgcctgctgttagatcagctgcggcattagattctcatagaagtgcaaaccctattgtgaactccgcatgc

SEQ ID NO: 4626 - DNA, 129 bp, Homo sapiens
  misc_feature 1..129: note = U/M: U (0.15:0.91) in Dermal Fibroblasts
  misc_feature 1..129: note = source = chr2:99690665-99690793; Gene: TSGA10 (intron)
  source 1..129: mol_type = genomic DNA
cggggtttcactatgttggccaggctggtctcaaactcctgacttcaagtgatccacccacctcggcctcccaaagtgctgggattacaggcgtaagccactgcgcccggccgttcctatttctttagc

SEQ ID NO: 4627 - DNA, 174 bp, Homo sapiens
  misc_feature 1..174: note = U/M: U (0.16:0.92) in Dermal Fibroblasts
  misc_feature 1..174: note = source = chr8:26238970-26239143; Gene: BNIP3L (Intergenic)
  source 1..174: mol_type = genomic DNA
cgcttcatcagattctgtaactgcagtcaggttgctgggcagcttgttgttgtttctgctggacattctggctgaagactggcttcgcggcgagcagttttaataaaactcagatggccagcagccgccaatccctaccagctgcggcttgaactcctgcttccgggtatgacc

SEQ ID NO: 4628 - DNA, 354 bp, Homo sapiens
  misc_feature 1..354: note = U/M: U (0.09:0.85) in Dermal Fibroblasts
  misc_feature 1..354: note = source = chr8:13359161-13359514; Gene: DLC1 (intron)
  source 1..354: mol_type = genomic DNA
cgaaattgacatgtgctagaattttagtatcccagcctgaccaagtatctttctggatactatttggttccctcagaggtctgtggccatcttgaaaagtggtcagccttcacattttccatgttgacgttcactctgcactcaaaagaaaatataaaatctctgaattccatgcataagtcattataacgtgggaggctacggaaagtggaaagaacacatagatgcaagccagaaaatttctgctttcatgggcacatttgggaggtaatagggttttagatacttttctctctttatttttatccagtgtagaaagagccggctcacttaagaaataccaagtggtattac

SEQ ID NO: 4629 - DNA, 70 bp, Homo sapiens
  misc_feature 1..70: note = U/M: U (0.16:0.9) in Dermal Fibroblasts
  misc_feature 1..70: note = source = chr16:81183400-81183469; Gene: PKD1L2 (exon)
  source 1..70: mol_type = genomic DNA
cgcgggtgaagctgctgcgagcgcagcggctgaagatcgaataccagatgtgtccatcctggaagcccgc

SEQ ID NO: 4630 - DNA, 362 bp, Homo sapiens
  misc_feature 1..362: note = U/M: U (0.1:0.84) in Dermal Fibroblasts
  misc_feature 1..362: note = source = chrX:134033886-134034247; Gene: MOSPD1 (intron)
  source 1..362: mol_type = genomic DNA
cgaggcaggataatcgcttgaacctgggaggtaaaggatgcagtgacccgagatcacactgctgcactccagcctgggctacagagggagactccgactcaaaaaaagtccccaaatcacttaaacatggcttttgactttttcccttgacttacttgtatagcttttaccaaattatgcaaagaagtttatacatgctcctttcacattgaggattttaacctatgattaataatctaaatactcaaaggaataaagaagtctttctcaaattaatgaccccctttcaaagaggtgagatcaaagggatatcgctctttttaaacctcagattttttaaaaagtagaataaattaagtatc

SEQ ID NO: 4631 - DNA, 201 bp, Homo sapiens
  misc_feature 1..201: note = U/M: U (0.18:0.91) in Dermal Fibroblasts
  misc_feature 1..201: note = source = chr17:6152148-6152348; Gene: WSCD1 (Intergenic)
  source 1..201: mol_type = genomic DNA
cgaggcccgggcatgccaaattatttcccctggtgatgcccttttgcacagaatttagcactggaaatgaagaccatatgtgcccagcaacaaaacatcccaatgaaaaatggaaaacgaaggcgctgctttgtctattaaatgccaaacatccaggactttccgcataagcagatgctgatcaccaccctgtaggagagc

SEQ ID NO: 4632 - DNA, 232 bp, Homo sapiens
  misc_feature 1..232: note = U/M: U (0.2:0.9) in Dermal Fibroblasts
  misc_feature 1..232: note = source = chr1:222080603-222080834; Gene: DUSP10 (Intergenic)
  source 1..232: mol_type = genomic DNA
cgggaaaggcagaagtgtcctgaatgttcaacaatataccatacagcttctttttattaaaatctcatttcactgggatagctcctttgagagagatgtgcagaataatgctaggaaatcagtgaaccaacaccacttaattatatcacgcatattaaaaattcctgcttatgcattcgctatgcactttgctgcacttagtgcacagggagagcaaggacgtcattggctc

SEQ ID NO: 4633 - DNA, 141 bp, Homo sapiens
  misc_feature 1..141: note = U/M: U (0.07:0.76) in Dermal Fibroblasts
  misc_feature 1..141: note = source = chr19:36662820-36662960; Gene: COX7A1 (Intergenic)
  source 1..141: mol_type = genomic DNA
cggtggctcacgcctgtactcccagcactttgggaggccgaggcaggcggatcacgaggtcaagagatcgagaccatcctggctaatgcggtgaaaccctgtctctactaaaaatacaaaaaattagccaggcatggtggc

SEQ ID NO: 4634 - DNA, 318 bp, Homo sapiens
  misc_feature 1..318: note = U/M: U (0.2:0.89) in Dermal Fibroblasts
  misc_feature 1..318: note = source = chr3:11791178-11791495; Gene: VGLL4 (Intergenic)
  source 1..318: mol_type = genomic DNA
cggaagggagggctcattcacacccacagtgcctggagatccgctgggtctgcttgttctcatgttggcttctagggatggcagagctggctttggttagtgagacccactgtggccatttggataccggaaatctctgcatgcatgtgtactcatgtgaaccaaaggcttcatggagtgtcaatttctttttctttcttttttttttttttttgacggagtcttgctctgttgcccaggctggagtgcagtggcacgatctgggctcactgcaagctccacctcccggttcatgttattctcctgcctcagcctccc

SEQ ID NO: 4635 - DNA, 323 bp, Homo sapiens
  misc_feature 1..323: note = U/M: U (0.22:0.89) in Dermal Fibroblasts
  misc_feature 1..323: note = source = chr7:6266433-6266755; Gene: CYTH3 (intron)
  source 1..323: mol_type = genomic DNA
cgggcgcggtggctcatgcctgtaatcctagcactttgggaggccaaggtgggcggatcacgaggtcaggagatcgagaccatcctggctaacacggtgaaaccccgtctctactaaaaatacaaaaaattagccaggcgtggtggcgggcacctgtagtcccagctactcaggaggctgaggcagaagaacggtgtgaacccgggaggcggagcttgcagtgagctgagatcgcgccactgcactccagcctgggcaacagagcaagactctgtctaaaaaaaaaaaaaaaaaagtggaaagggctggcacatggtgtgccc

SEQ ID NO: 4636 - DNA, 204 bp, Homo sapiens
  misc_feature 1..204: note = U/M: U (0.3:0.93) in Dermal Fibroblasts
  misc_feature 1..204: note = source = chr11:66816067-66816270; Gene: SYT12 (exon)
  source 1..204: mol_type = genomic DNA
cgcgtgacggtggctgagagcagcagcgacggccgtggggacaacgtgggccatgtcatcattgggccgtcagccagtggcatgggaaccacacattggaaccagatgttggccacgctgcgcaggcccgtgtccatgtggcacgctgtccggcgaaactagcaaccagggcgggccagttgggcaatggagctgctggagccc

SEQ ID NO: 4637 - DNA, 76 bp, Homo sapiens
  misc_feature 1..76: note = U/M: U (0.06:0.66) in Dermal Fibroblasts
  misc_feature 1..76: note = source = chrY:7287132-7287207; Gene: PRKY (Intergenic)
  source 1..76: mol_type = genomic DNA
cgccagcctaagccacgcatgaggtaacccattttcagaacggtcgttccagacacatggtgcccagatgggagcc

SEQ ID NO: 4638 - DNA, 451 bp, Homo sapiens
  misc_feature 1..451: note = U/M: U (0.35:0.95) in Dermal Fibroblasts
  misc_feature 1..451: note = source = chr17:64077760-64078210; Gene: CEP112 (intron)
  source 1..451: mol_type = genomic DNA
cgcagtggctcacgcctgtaatcccagcactccgggaggccgaggcaggtggatcacaaggtcaggagttcaagaccagcctggccaacatggtgaaaccctgtctctactaaaaatacaaaaattagccggacatggtggcacgcatctgtagtcccagctactcgggaggctgaggcaggagaatcgcttgaacccaggagacagagattatggtgagccgagattgcgccactgcattccagccttggcaacagagcaagactccatctcagggggaaaaaaaggcctacttggcattacacataataaagaagcaacatctctttttaggcaatagatggaaacattcaatatgggtgaaaagaaaggtcaaaggaaattttctattttatttcacaaaaagagtaattttttactccggtttctcttcagattgtataaatctttc

SEQ ID NO: 4639 - DNA, 177 bp, Homo sapiens
  misc_feature 1..177: note = U/M: U (0.35:0.92) in Dermal Fibroblasts
  misc_feature 1..177: note = source = chr6:80776401-80776577; Gene: BCKDHB (Intergenic)
  source 1..177: mol_type = genomic DNA
cgattagtatgagctggtgggcagtcatctagtcggacgccgaaagttcctgtagcagttggctttctctcaaatgtctttctcatgatacttggaatgccttttctccatgtgctttcgtcttttgggggactggtatcatctttactgagaagtttcctttctgactcttccttc

SEQ ID NO: 4640 - DNA, 273 bp, Homo sapiens
  misc_feature 1..273: note = U/M: U (0.32:0.88) in Dermal Fibroblasts
  misc_feature 1..273: note = source = chr7:65668495-65668767; Gene: TPST1 (Intergenic)
  source 1..273: mol_type = genomic DNA
cggagtctcactctgttgcccaggctggagtgcagtggcacaatcttggctcactgcaacctccacctcccgggttcacgccattctcctgcctctgcctcccgagtagctgggactacaggcgccagccaccatgcctggctaaatttttgtatttttagtagagacggggtttcaccgtgttaaccaggatggtctcgatctcctgaccttgtgatccgcccacctcggcctctcaaactgctgggattacaggcgtgagccactgcaccc

SEQ ID NO: 4641 - DNA, 313 bp, Homo sapiens
  misc_feature 1..313: note = U/M: U (0.09:0.61) in Dermal Fibroblasts
  misc_feature 1..313: note = source = chr17:79390776-79391088; Gene: BAHCC1 (intron)
  source 1..313: mol_type = genomic DNA
cgttgccgtgttgtcccctgcatgtccacagctagactggacatgtccagggtcagggcagggggtgggggctccggttgagaggccggagtgtaggagggcaggtgggtgtccacgtggcctcccttgctctgcagggacccgagggccagggtggattcctgggctggggtgtgcgtgcgtgtgcccctgacatcttcaccggggtgtccgtctccccgcagctggctgtctcaagatggtgggatgggaagcgttcagtttggggcgaggagactcatccagctgcggggggcggcgccgagggagtggc

SEQ ID NO: 4642 - DNA, 291 bp, Homo sapiens
  misc_feature 1..291: note = U/M: U (0.04:0.9) in Dermal Fibroblasts
  misc_feature 1..291: note = source = chr2:60457415-60457705; Gene: MIR4432 (Intergenic)
  source 1..291: mol_type = genomic DNA
cgcacaggcgcgcgcgtgtctgtgtgtgtgtgtgtgtatgttagttcatgtactgtgagatgagtggcagactctccagatggttcactagaaaccttacttcagggctcccccagtgcttctgctccatcaaagggactttgagtttggagtttgagtaaattaacaacatccctgttctttatttatctcccttctgactgtgataaatagccctggggaatccttcctatttctgggttgagaaaaaaatgaaacatctctgcctacatttcacaccaatatggttcg

SEQ ID NO: 4643 - DNA, 155 bp, Homo sapiens
  misc_feature 1..155: note = U/M: U (0.09:0.85) in Dermal Fibroblasts
  misc_feature 1..155: note = source = chr18:7129948-7130102; Gene: LAMA1 (Intergenic)
  source 1..155: mol_type = genomic DNA
cgaagaaacatgacttagtgactaattggatgcagacgatcaaggaaattgttgagttaaaattttctttctgagaatgaaaaaaagaagggttagatgaaagatgaaccgacgggagaggaaatcatgagcacagtttgattgttgtcatttcg

SEQ ID NO: 4644 - DNA, 304 bp, Homo sapiens
  misc_feature 1..304: note = U/M: U (0.08:0.84) in Dermal Fibroblasts
  misc_feature 1..304: note = source = chr8:62322984-62323287; Gene: CLVS1 (intron)
  source 1..304: mol_type = genomic DNA
cggtagatcgactttctttacataattctacataatacaaatccatctgctgtgaatagaaatagagttgattatccaaagcccattgtgcaatttcttgggtcagaagccttttggcctccatcagaacagccttcttcgctctacttctattctctgcatacccgccccactctccactccatcagattgctttctttctttttctttttccttttttattttttattgttttgagacagaatcttgctctgtcaccccggctggagtgcagtggcataatcttggctcactgcagcctccg

SEQ ID NO: 4645 - DNA, 386 bp, Homo sapiens
  misc_feature 1..386: note = U/M: U (0.16:0.9) in Dermal Fibroblasts
  misc_feature 1..386: note = source = chr3:61649226-61649611; Gene: PTPRG (intron)
  source 1..386: mol_type = genomic DNA
cgggggttggggggatggttttgggatgagtcaagtgcattacatttattatgcgctatatttctattattactatattgcaatatataatgaaataattatacagttcaccaaactgtagaatcagtgggagccctgagcttgctttcctgcaactaagcagtcccatctgagggtaatgggagacagtgacagatcatcaggcattagagcctcataaggagcgggcaacctagatccctcacgtgcacagcccataatagaatttttgctcctatgagaatctaatgctaccactgatctgacaggcggcagagctcaggcagtaatgctctcttgccctccactcacctcctgttgtgcagctcggttcctgacagggcacg

SEQ ID NO: 4646 - DNA, 69 bp, Homo sapiens
  misc_feature 1..69: note = U/M: U (0.17:0.9) in Dermal Fibroblasts
  misc_feature 1..69: note = source = chr16:81183402-81183470; Gene: PKD1L2 (exon)
  source 1..69: mol_type = genomic DNA
cgggtgaagctgctgcgagcgcagcggctgaagatcgaataccagatgtgtccatcctggaagcccgcg

SEQ ID NO: 4647 - DNA, 128 bp, Homo sapiens
  misc_feature 1..128: note = U/M: U (0.13:0.86) in Dermal Fibroblasts
  misc_feature 1..128: note = source = chr7:1182309-1182436; Gene: C7orf50 (Intergenic)
  source 1..128: mol_type = genomic DNA
cgccctgtcgctcagactggactgcaatggcacgatctcagctcactgcaacctccacctcccaggttcaagcgattctcctgcctcagcctcccgagtagctgggattacaggcacgtgccaacacg

SEQ ID NO: 4648 - DNA, 385 bp, Homo sapiens
  misc_feature 1..385: note = U/M: U (0.1:0.83) in Dermal Fibroblasts
  misc_feature 1..385: note = source = chr5:4023345-4023729; Gene: IRX1 (Intergenic)
  source 1..385: mol_type = genomic DNA
cggtttggccgctcaccccgcctggctgcccacgtaagccacagcaacacatgagcgagaagaaaaaagtcttctgtttcatgttaaaaagtacaaatatgatattattgattcagaaaggaaatgtgctgagcgaggactcaaagtacagctgaatcgaaccccggggacagcttatgggatggaatatgagtacagctttagaatgaaaacagatgttgctcttcacgaaactaaaaaaaagtttttaaaatttgcatttttggtcaaagcggcagcaggctaacacctggacaatggatttcacaaagaaaatgtccaattgtcttgagaatgctgcagagagaggaaaaaggtagctcagatcttgcagaggagcaggacg

SEQ ID NO: 4649 - DNA, 119 bp, Homo sapiens
  misc_feature 1..119: note = U/M: U (0.13:0.85) in Dermal Fibroblasts
  misc_feature 1..119: note = source = chr13:114620058-114620176; Gene: LINC00565 (Intergenic)
  source 1..119: mol_type = genomic DNA
cgggagcctcgcgttgccagtgaaatcaacccagatgtgcaggcatgaaaaaaaaatagccggaaaatctgcccaggagaccagggacagccaggagacacaacgccagggccggggcg

SEQ ID NO: 4650 - DNA, 220 bp, Homo sapiens
  misc_feature 1..220: note = U/M: U (0.16:0.88) in Dermal Fibroblasts
  misc_feature 1..220: note = source = chr10:2409461-2409680; Gene: LINC00701 (Intergenic)
  source 1..220: mol_type = genomic DNA
cggagagtccgcagtgtacgcactcttgtgagcctggggatgagaatcgggagacagtcaaagtgtggtccacaggaaatgctctctctgttggctctctgttgggagtcatctgttttaaaagactgtgtctttgtagcttggaagatttgtgagtgtcctcaggaaattgttctaattttcctaaggactacttagaaatccacattggaaatcatcg

SEQ ID NO: 4651 - DNA, 243 bp, Homo sapiens
  misc_feature 1..243: note = U/M: U (0.1:0.82) in Dermal Fibroblasts
  misc_feature 1..243: note = source = chr17:54337761-54338003; Gene: ANKFN1 (intron)
  source 1..243: mol_type = genomic DNA
cggtggtggtggtggtggggcggggtaggggtgctgattcactttgcaccgcctttggcaaataggggcgggtggggacaaggtttctaacatctcctttaaaaggaggccatacttctccttgggcatcaactaattcatcccaaccagcatttttgatgagttaagtgcaaatgaatcagtaacatacggattgcatttgaaatacacatggggtttaaaaatgaaggaaaaaagtactcg

SEQ ID NO: 4652 - DNA, 101 bp, Homo sapiens
  misc_feature 1..101: note = U/M: U (0.15:0.86) in Dermal Fibroblasts
  misc_feature 1..101: note = source = chr13:22330275-22330375; Gene: FGF9 (Intergenic)
  source 1..101: mol_type = genomic DNA
cgagccacggcatgcagggcactgtatttcatgtgtgtcaaggatcgcagttggagcacgtcgttcactcagggactcaggtgtggctgggctggcctgcg

SEQ ID NO: 4653 - DNA, 341 bp, Homo sapiens
  misc_feature 1..341: note = U/M: U (0.09:0.8) in Dermal Fibroblasts
  misc_feature 1..341: note = source = chr2:1113111-1113451; Gene: SNTG2 (intron)
  source 1..341: mol_type = genomic DNA
cgttgaaatgaagacttaacatcaaattcagcaaaacagatgaaatcaattaaaatataacatggcgtgcagggcaggcacggcctcctgcccctggggagctggagccctcacggagtcctgtgtgtggctgtgctttctggggctgagcagatgaggtagctcagttccccaggaatcagaaccgaggcggagctgtgccaccccagcctccagggtgaacagcaacagctccctgaaactggacgagctccccagagttcaagctacagaggttcctgcctccccagggcatggagtcctcactgcactgctccccaccttgtgggccccaggctgcg

SEQ ID NO: 4654 - DNA, 103 bp, Homo sapiens
  misc_feature 1..103: note = U/M: U (0.16:0.86) in Dermal Fibroblasts
  misc_feature 1..103: note = source = chr10:102566154-102566256; Gene: PAX2 (exon)
  source 1..103: mol_type = genomic DNA
cgctaacgccccgagtgtccatgtgttctccagatgtgtctgagggctcagtccccaatggagattcccagagtggtgtggacagtttgcggaagcacttgcg

SEQ ID NO: 4655 - DNA, 38 bp, Homo sapiens
  misc_feature 1..38: note = U/M: U (0.18:0.87) in Dermal Fibroblasts
  misc_feature 1..38: note = source = chr22:49061263-49061300; Gene: FAM19A5 (intron)
  source 1..38: mol_type = genomic DNA
cgtcatcttaccccaaagccgtgagacgttctctcgcg

SEQ ID NO: 4656 - DNA, 169 bp, Homo sapiens
  misc_feature 1..169: note = U/M: U (0.21:0.9) in Dermal Fibroblasts
  misc_feature 1..169: note = source = chr6:167384565-167384733; Gene: RNASET2 (Intergenic)
  source 1..169: mol_type = genomic DNA
cgaggccacaagcatcacggagcaggggcctgcccactctgcctcctgagaattcttgaccagcagaattcacgaatgtacaaagcttcgggggttatgttttaaataacttcatactgaatcaagttgaccctcaagatcaagattcattctcagcataactgacacg

SEQ ID NO: 4657 - DNA, 213 bp, Homo sapiens
  misc_feature 1..213: note = U/M: U (0.18:0.87) in Dermal Fibroblasts
  misc_feature 1..213: note = source = chr10:110085565-110085777; Gene: RNU6-53 (Intergenic)
  source 1..213: mol_type = genomic DNA
cgcagaagtgccagggtgccagggaaagaaaatctcctgatgttccacagctgttaaaattaaagtgttaattgagtgcagatgccagggagaagcaacttcctggacatatgtgttaagagacaaaatggcaaagtatgatattccagggacgctccaccagaaaagggaagaaagcctcgggcgtgtgtacaacgtcctaaacacactgcg

SEQ ID NO: 4658 - DNA, 163 bp, Homo sapiens
  misc_feature 1..163: note = U/M: U (0.2:0.88) in Dermal Fibroblasts
  misc_feature 1..163: note = source = chr11:1639388-1639550; Gene: MOB2 (intron)
  source 1..163: mol_type = genomic DNA
cggtgaagatcaggcggttcaccctgaaagagaagctggtcaaggaggcaagatagaggcttcccaatggggtgagttgacctcaaagagaggcgtccgtgaaggatgagaaggagctcagttgtttttgctacgcgactcccttcagcgtcattctgtcacg

SEQ ID NO: 4659 - DNA, 234 bp, Homo sapiens
  misc_feature 1..234: note = U/M: U (0.2:0.88) in Dermal Fibroblasts
  misc_feature 1..234: note = source = chr2:28575383-28575616; Gene: FOSL2 (Intergenic)
  source 1..234: mol_type = genomic DNA
cggcaggcctttgctgttgggaaggggtgggagacgtcttccccaaggcagagaagtgtccccaacactttcactggctccatctgtttcccagcttctgaagatggacagagaacttggagacagcattcacccattctcccaccctgccaatcgtctccctgttcccccacttattcttgcctttacttgcacgccacagtcatacggcaaacacagcacctccttgacacg

SEQ ID NO: 4660 - DNA, 280 bp, Homo sapiens
  misc_feature 1..280: note = U/M: U (0.21:0.89) in Dermal Fibroblasts
  misc_feature 1..280: note = source = chr18:21300187-21300466; Gene: LAMA3 (intron)
  source 1..280: mol_type = genomic DNA
cggttcgttccatttatgacacttgagtctctctgcaacattttaagagtattttatagctataacaaaattagaaaatacagaagattatatttagaacaattttgctattaataaatggtgtttttttgtttttgtttttgttttttttgagatggagtctcactctgtcaccaggctggagtgcagtggcgcaatctcggctgactgcaacctctgcctcccaggttcaagtgattctcctgcctcagcctcccgagtagctgggactacaggcacg

SEQ ID NO: 4661 - DNA, 59 bp, Homo sapiens
  misc_feature 1..59: note = U/M: U (0.21:0.88) in Dermal Fibroblasts
  misc_feature 1..59: note = source = chr7:155211140-155211198; Gene: EN2 (Intergenic)
  source 1..59: mol_type = genomic DNA
cgcaccgcagaccgcacgacagaccgcaccgcagaccgctctacagaccggcacatgcg

SEQ ID NO: 4662 - DNA, 68 bp, Homo sapiens
  misc_feature 1..68: note = U/M: U (0.24:0.91) in Dermal Fibroblasts
  misc_feature 1..68: note = source = chr21:40021088-40021155; Gene: ERG (intron)
  source 1..68: mol_type = genomic DNA
cgcacccgcagatacccaacctgagaagctgatgggaaacggctgttttggcatcaccgagggctgcg

SEQ ID NO: 4663 - DNA, 181 bp, Homo sapiens
  misc_feature 1..181: note = U/M: U (0.15:0.82) in Dermal Fibroblasts
  misc_feature 1..181: note = source = chr6:1406547-1406727; Gene: FOXF2 (Intergenic)
  source 1..181: mol_type = genomic DNA
cgtctgaggaggctgggcaaaggcagcctgcatggcctccaggactcccaccctttccactgaggtcccatgggagagaaccagctgctctgagagcccgcgggccgtgtctccatcagcttaaccccaaatgagaaccaggtgtgtccaggcccagtcttggctccccgggagtgaggcg

SEQ ID NO: 4664 - DNA, 290 bp, Homo sapiens
  misc_feature 1..290: note = U/M: U (0.2:0.87) in Dermal Fibroblasts
  misc_feature 1..290: note = source = chr2:62443595-62443884; Gene: B3GNT2 (intron)
  source 1..290: mol_type = genomic DNA
cggtggtacaatctcagctcactgctgcctggatcttctgggttcaagcagccctcccacctcagcctcctgagtggctgggaccacaggtgcatgccactacacccagctaatttttttttaatgtagacatggggtctcgctatgttgcccaggttggtctcgaactcctgggctcaagcaatcctctcaccctggcttcctaaagtgttggggttacaggcgtgagccatggcacccagcccatagcttccgattaatagaacggtgggacagtaggaaaatgggcg

SEQ ID NO: 4665 - DNA, 298 bp, Homo sapiens
  misc_feature 1..298: note = U/M: U (0.2:0.87) in Dermal Fibroblasts
  misc_feature 1..298: note = source = chr13:23820643-23820940; Gene: SGCG (intron)
  source 1..298: mol_type = genomic DNA
cgacaatcctcaaaacctaagggacaggctgtgggagcatccgttgaaagatgatcagcctttggctgatagcctttgactgttgccctcattttgcccattattataatgactatcaagaaagaagtattttaaaagccttacaacaccccaagtctgtggcatttggagaaatgggcttggattactccaacatgtgcaccacacatgtcccagagcagcagaaggtatttaaaagatagctgcagctggccgtctctcttaaagaagcccatgatgatccactgccgagaagccg

SEQ ID NO: 4666 - DNA, 347 bp, Homo sapiens
  misc_feature 1..347: note = U/M: U (0.19:0.86) in Dermal Fibroblasts
  misc_feature 1..347: note = source = chr18:26042946-26043292; Gene: CDH2 (Intergenic)
  source 1..347: mol_type = genomic DNA
cgtctaggaagtaaattctgtagtttcactcagacttcagatgactgcagccctaacaagtctgcaatatcatgagagacattgagctcgaacccccgctgctgaattcctgacccaaaagacctatgtgaaataatataatattattgtcattttaagcgactacattttagggtaattttttgtgcagtaaaagataaccacagcataattcatggtctttctgttatttagaagtcatcaggagctctgtgctgccttttagatgtccctgaagtaagctgttgtacatatggccaacacatgctttctgaaacagtaggggtattgttagatatgtcttgtcg

SEQ ID NO: 4667 - DNA, 69 bp, Homo sapiens
  misc_feature 1..69: note = U/M: U (0.19:0.85) in Dermal Fibroblasts
  misc_feature 1..69: note = source = chr17:7256414-7256482; Gene: KCTD11 (exon)
  source 1..69: mol_type = genomic DNA
cggagagacagcgctgctcagggcagaggctgacttctaccagatccggcccctcctggacgcgctgcg

SEQ ID NO: 4668 - DNA, 156 bp, Homo sapiens
  misc_feature 1..156: note = U/M: U (0.19:0.85) in Dermal Fibroblasts
  misc_feature 1..156: note = source = chr4:183312528-183312683; Gene: TENM3 (intron)
  source 1..156: mol_type = genomic DNA
cgacttgttccacttatatataatttttcatcaaagttactgagcgctcattgtgaggcttgaatagacacagttaaataaaaccatgactggccctggctctaaggaggccagcgtcctgcaaacacaggcacacggctgttagaaatgaggacg

SEQ ID NO: 4669 - DNA, 272 bp, Homo sapiens
  misc_feature 1..272: note = U/M: U (0.22:0.88) in Dermal Fibroblasts
  misc_feature 1..272: note = source = chr15:99981501-99981772; Gene: MEF2A (Intergenic)
  source 1..272: mol_type = genomic DNA
cggcctgccccagctccgatgcccctcctcagttgggggaagaggatgttccgtctcctgtctatactaagtacaaactacgtttatctccagcttcttttttgatttgcaaaaggctatcttggattttgttgttgttaagcacagtgcctgttttttgcttttttttcattcccacaatcactttccttctcctgaaagcaatgtgggtgtgaggactttgggaaaggaagagctcaaggatggatccttcgagacgctgtctctaagcg

SEQ ID NO: 4670 - DNA, 469 bp, Homo sapiens
  misc_feature 1..469: note = U/M: U (0.12:0.78) in Dermal Fibroblasts
  misc_feature 1..469: note = source = chrX:25734836-25735304; Gene: MAGEB18 (Intergenic)
  source 1..469: mol_type = genomic DNA
cgagctgcacttcttgaactttcatattcataaaaatcacctggggatcttgataaagtacagattgtgacttaggaggtctgatgcaggcttgagattctgcattctctaacaacttccaggtgatgctgatacttctgccctgcagatcgcacctgacgaggaaagcattcctttaagatcatcgtaaggtttctaaagtatatctggcataccagctgcagttatgcttataaggactccctaaaagggtagcagttctttctttcctggaagcaaatatgaatgatcctttgagacaatgtggtctcagtaaagtgttatccacatagtgagagaaagatcagcttgctctaattaaacaagttgaattcttctacatgtaccatgtgtgatcttccagtgttaggagcactgaggttcagtaatattcatgtagcacaaaagtggcactggatacaatttaacg

SEQ ID NO: 4671 - DNA, 234 bp, Homo sapiens
  misc_feature 1..234: note = U/M: U (0.16:0.81) in Dermal Fibroblasts
  misc_feature 1..234: note = source = chr15:89111807-89112040; Gene: DET1 (Intergenic)
  source 1..234: mol_type = genomic DNA
cgcagacagccctctctcccattccccattaaagagcaagtttattttctaataaaagagagaaacgaaaagaagaaaagaaaagaaaagcaactttggggggaaggactattacactgaaaggaattacagtgtcaatgcttaggactattacactattacgcttaggggaaggactattacactgaaaggaattacagtgtcatgccatcgcaattaacatgtcccacagcg

SEQ ID NO: 4672 - DNA, 306 bp, Homo sapiens
  misc_feature 1..306: note = U/M: U (0.21:0.86) in Dermal Fibroblasts
  misc_feature 1..306: note = source = chr17:54512024-54512329; Gene: ANKFN1 (intron)
  source 1..306: mol_type = genomic DNA
cgtcagttcctaatttaaaacccacaagtgttgagcgggttcatgctgcagcaagacacatcttctcatctctagaaatgactgtatttgatctcggtctgggtttctcggcacgtccttctctctctctctctcttcttcttgtgctatggttggcctgaaaggttagaaactgcacaattagatggatcgggggaagatttcataatgctctggtgctgggttgggcagtctagccaaattccgttcattagctaaggcgccagggtgaatgtggccagtaagaatgctgttttggttccatcg

SEQ ID NO: 4673 - DNA, 371 bp, Homo sapiens
  misc_feature 1..371: note = U/M: U (0.19:0.84) in Dermal Fibroblasts
  misc_feature 1..371: note = source = chr5:91244079-91244449; Gene: ARRDC3 (Intergenic)
  source 1..371: mol_type = genomic DNA
cggaaggcatatggcaatagcagtaaaagtaaagatgcttttctgtgcaataattcttcattcacataacaatatgtaaagggataaatggtgtagtgctgaattttcatttctggttcactttgagggaggctggagaaactatcgcaaagtgaacgttttttcaatagtgtccacagctttttcatccttgggcatttaatatcatttggcttttaggaaagtgtggatccttttaaaagagagacagagctgtctctacagtgtcccctctttaaccattccaagggtagcattaaatagcagttgaaaactaccgaggtacacaaaggatctccctcaaagaaattatagtgagaaatgatgtctcg

SEQ ID NO: 4674 - DNA, 81 bp, Homo sapiens
  misc_feature 1..81: note = U/M: U (0.22:0.86) in Dermal Fibroblasts
  misc_feature 1..81: note = source = chr5:120422725-120422805; Gene: PRR16 (Intergenic)
  source 1..81: mol_type = genomic DNA
cgggaaacttaaaatcattgcagaaggcaaagaagctgtcacgtccaacatcgctggagcacgaggaagagagagcaaacg

SEQ ID NO: 4675 - DNA, 140 bp, Homo sapiens
  misc_feature 1..140: note = U/M: U (0.23:0.87) in Dermal Fibroblasts
  misc_feature 1..140: note = source = chr5:89819-89958; Gene: PLEKHG4B (Intergenic)
  source 1..140: mol_type = genomic DNA
cgggacccagaagaaccaaacacctcaacatccatctgctgtgtccagcccgattcctgtgttccttccacatctcatgtggtgcatctcctggcaaaaccgggcacatctgcacaccagctgcaagggatcccggagcg

SEQ ID NO: 4676 - DNA, 163 bp, Homo sapiens
  misc_feature 1..163: note = U/M: U (0.17:0.81) in Dermal Fibroblasts
  misc_feature 1..163: note = source = chrX:18852174-18852336; Gene: PHKA2-AS1 (Intergenic)
  source 1..163: mol_type = genomic DNA
cgtaactttaaatttatttttggcttcttaaattttatagaaagactaaatatggctgggtgcagtggctcatgcctgtaatcccagcactttgggaggccgaggtgggcggatcacgaggtcaggagttccagatcagcctggacaacatggtgaaaccccg

SEQ ID NO: 4677 - DNA, 374 bp, Homo sapiens
  misc_feature 1..374: note = U/M: U (0.23:0.87) in Dermal Fibroblasts
  misc_feature 1..374: note = source = chr14:81712529-81712902; Gene: GTF2A1 (Intergenic)
  source 1..374: mol_type = genomic DNA
cgaggagttcccttagcaaggttgaaaatttcagtctctggtatttggaatttaggctgcagtccttgtttttggatggaccactgggtgtgtggcacagtccatgcttttaaccagatttgaacagaagaatggccacttggcccaggtagaagtagatgaagtgtttggtttcatgtgtcacgtaactactgaagttcctccccaggatgcagtgccaggtggcattgtacttcttgtcacattccttcttgatatgagccgcagtgttcttctctatgttgtatttctccagcgcctgaggagcgcactccactgagttctgttgcatctcctccgacatgtccgcatttttgatcacggcctttcggtcg

SEQ ID NO: 4678 - DNA, 92 bp, Homo sapiens
  misc_feature 1..92: note = U/M: U (0.31:0.94) in Dermal Fibroblasts
  misc_feature 1..92: note = source = chr17:15242034-15242125; Gene: TEKT3 (intron)
  source 1..92: mol_type = genomic DNA
cgtgttagctaggatggtctcgatctcctgaactcgtgatctgccagcctcggcctcccaaagtgttgggattacaggcgtgagccaccgcg

SEQ ID NO: 4679 - DNA, 103 bp, Homo sapiens
  misc_feature 1..103: note = U/M: U (0.24:0.87) in Dermal Fibroblasts
  misc_feature 1..103: note = source = chr13:114620235-114620337; Gene: LINC00565 (Intergenic)
  source 1..103: mol_type = genomic DNA
cgggacacgccccggaggcccgtcgggaggtcaggcagtcccacgggggaagcagctcagcccagtgaagtggccgtccacactctcagaggagcctaccacg

SEQ ID NO: 4680 - DNA, 122 bp, Homo sapiens
  misc_feature 1..122: note = U/M: U (0.28:0.91) in Dermal Fibroblasts
  misc_feature 1..122: note = source = chr21:41218176-41218297; Gene: PCP4 (Intergenic)
  source 1..122: mol_type = genomic DNA
cggacaccttccccttctgcgggggtctgatgcccttcctttcaaagatgttaataattcagtccacagatgggccgctgtcttatgcgaaataacttgcactccttaaatccagagcagcg

SEQ ID NO: 4681 - DNA, 182 bp, Homo sapiens
  misc_feature 1..182: note = U/M: U (0.26:0.89) in Dermal Fibroblasts
  misc_feature 1..182: note = source = chr5:166774911-166775092; Gene: TENM2 (intron)
  source 1..182: mol_type = genomic DNA
cggcagatggaaacacagagcattacccaaaagaatctacaggggcaaccaccaaacagtccctcatgtccaccgtgccctttgagaagagagaagagaagtgatcgcatccaaaattctgccagcaggcaagggaatgttcccatatgccttttaaactggactagacggcgtgttgttcg

SEQ ID NO: 4682 - DNA, 232 bp, Homo sapiens
  misc_feature 1..232: note = U/M: U (0.25:0.88) in Dermal Fibroblasts
  misc_feature 1..232: note = source = chr18:52781109-52781340; Gene: CCDC68 (Intergenic)
  source 1..232: mol_type = genomic DNA
cgcctcctttctctgagccttccctctaggggaagttcctctagggaacaacaactcatatgttgtgaacagccctgggaagagacccatgaggcaaggaactgccagtccaagggccccgaggtcagctgtgggaatgagctgggaagtagattcaccccagttgagtcctcacggccctggccaacacttcatggtagaccctgagccagagaactgaactacgccaccg

SEQ ID NO: 4683 - DNA, 84 bp, Homo sapiens
  misc_feature 1..84: note = U/M: U (0.22:0.84) in Dermal Fibroblasts
  misc_feature 1..84: note = source = chrX:118747545-118747628; Gene: NKRF (Intergenic)
  source 1..84: mol_type = genomic DNA
cgctttacagaaaaagtttgcagctgggtgcggtggctcacgcctataatcccagctctttgggaggccgaagtggaaggatcg

SEQ ID NO: 4684 - DNA, 427 bp, Homo sapiens
  misc_feature 1..427: note = U/M: U (0.27:0.89) in Dermal Fibroblasts
  misc_feature 1..427: note = source = chr11:130886648-130887074; Gene: SNX19 (Intergenic)
  source 1..427: mol_type = genomic DNA
cgatactaatcctgctttcatcattaggtttcatttcagtgtccatatcatagaagggagcacattataaaagaagtcaaaagcggtcgtgaataattgaaaccctcctgccagatcggctaatgtcaatttgttttctggcactgcctcttctatgtcttcttccacatcatctggtactgattcaaaagcgctcatctccattaagttgtcttctcttaattcctctgctgtggtgtttattagatcttgaatatctctgagattcatgtcttgaatcacttcatgccccacctttttgatatattcacaatctctttgatgatttccttggtctactctgttgtaaatcctatgaagccacgcacagcatctggacacagttacctccggcaggaatctattgttttccacctgatggcttccg

SEQ ID NO: 4685 - DNA, 140 bp, Homo sapiens
  misc_feature 1..140: note = U/M: U (0.27:0.88) in Dermal Fibroblasts
  misc_feature 1..140: note = source = chr5:66934952-66935091; Gene: CD180 (Intergenic)
  source 1..140: mol_type = genomic DNA
cggcactgtctctccatgtgtatacaaattcaccttcgtgtttctcgtgttgtctctcatccttccccatctctgttaagtgtgcttcacagacatcgtgcccgccttgcttccctcctctgtttttcccttgggcgccg

SEQ ID NO: 4686 - DNA, 438 bp, Homo sapiens
  misc_feature 1..438: note = U/M: U (0.29:0.9) in Dermal Fibroblasts
  misc_feature 1..438: note = source = chr2:145408181-145408618; Gene: DKFZp686O1327 (Intergenic)
  source 1..438: mol_type = genomic DNA
cgtatacaatatggaaaaatatgttttataagaaacatagcaggacttataaagatattccatatgcagtaaaaacacataactaatcgaagcaggattacacttttctcccacatagaatctcaaatactcactgttttgtttttaaagaagtaatattcagctctgctatttattaaaaaaaaatcaccatgctactatcgatttaataattacggaaaggaaaagaaaatatttaaaatccctttcttttctttcatcttttttttttttttgtaaaaagctctattttttcagagcattttatttattccgctgcagcttttagagaggccagccaatcagaaagtctgtgaaggcccaggcccaggctcagtgttgagctccaaacgcgattccagtcctgacagggggattataggaaacagatgacttacg

SEQ ID NO: 4687 - DNA, 484 bp, Homo sapiens
  misc_feature 1..484: note = U/M: U (0.28:0.89) in Dermal Fibroblasts
  misc_feature 1..484: note = source = chr8:95040092-95040575; Gene: PDP1 (Intergenic)
  source 1..484: mol_type = genomic DNA
cgttgatgtcacaaatacatagatttcagtacatcgataaatcatttcaaaagggcggtgtccctgtgccctcattttcatatccccttgtggaaagtctttcagcgtacagttggttattcatatttgttgccatgtaagcactatctaggacaaatttttaaaaaatagaaaaacagaggggaaaaaatagaaaggacttgacactagccaagcttaaggccagttatctgcattaaaacatactacttgtgctgtgacagtctaggttggatggaagcctttctgttttctattgttggaatgccctctagactagatttggaaatgtttcactgtggtggttataagacatcaagtcatggctggctttgattagaacttgtcctaagaaataaatgccgttttaagcaacaaacatcccagagttctctttcagcaagctgttctgttttggaaagttgaccatgtgtgtctgagtacg

SEQ ID NO: 4688 - DNA, 92 bp, Homo sapiens
  misc_feature 1..92: note = U/M: U (0.27:0.87) in Dermal Fibroblasts
  misc_feature 1..92: note = source = chr11:42272254-42272345; Gene: LOC100507205 (intron)
  source 1..92: mol_type = genomic DNA
cgagacaggatgatcacgaggtcaggagattgagaccatcctggctaacggagtgaaacctcgtctctactaaaaatataaaaaattcgccg

SEQ ID NO: 4689 - DNA, 142 bp, Homo sapiens
  misc_feature 1..142: note = U/M: U (0.31:0.91) in Dermal Fibroblasts
  misc_feature 1..142: note = source = chr16:62994506-62994647; Gene: CDH8 (Intergenic)
  source 1..142: mol_type = genomic DNA
cggggcacggtagctcacgcctgtaatcccagcactttgggaggccgaggcgggtagatcacgaggtcaggagatcgagaccatcctggctaacacggtaaaatcctgtctctactaaaaatacaaaaaaattagccgggcg

SEQ ID NO: 4690 - DNA, 189 bp, Homo sapiens
  misc_feature 1..189: note = U/M: U (0.24:0.84) in Dermal Fibroblasts
  misc_feature 1..189: note = source = chr10:28685637-28685825; Gene: MPP7 (Intergenic)
  source 1..189: mol_type = genomic DNA
cgtgttaggcactttagagagctcatcaagtcatgttccctacttgggaatgtgaagtcttttttaaaaaacttcaacttttggccgggcgcagtggctcacacctgtaatcccagcactttgggaggccgaggtgggcagatcatgacatcaggagatcaagaccattctggctaacacagtgaaacg

SEQ ID NO: 4691 - DNA, 195 bp, Homo sapiens
  misc_feature 1..195: note = U/M: U (0.27:0.87) in Dermal Fibroblasts
  misc_feature 1..195: note = source = chr13:87215142-87215336; Gene: SLITRK6 (Intergenic)
  source 1..195: mol_type = genomic DNA
cgacatttcaggataaattgtcacttattttggcgtggaaagcaaaagataacttactagtcagattgcataccgaagaaacctgtagttgctgtgaggatagctgtccataaatctctgattttactttaatcttaccatatggctaactgatggaaaggcagcggaagaaacatgcatcatttccgggcatcg

SEQ ID NO: 4692 - DNA, 229 bp, Homo sapiens
  misc_feature 1..229: note = U/M: U (0.3:0.9) in Dermal Fibroblasts
  misc_feature 1..229: note = source = chr5:5132809-5133037; Gene: ADAMTS16 (Intergenic)
  source 1..229: mol_type = genomic DNA
cggggaattctccaaattgaatcctgacatccaggccctaacccttacccgtgacgttgggctctggtgatgggtccagaaatcaggaagtttacaactcctgagggattctgaatgcagcgctgagggaggtccgtggccccgatgagccttctcggggtggggttcactgggagcggagcagctgtcagggtgagtgtagcagcaggctgttcttagtgaggcagcg

SEQ ID NO: 4693 - DNA, 54 bp, Homo sapiens
  misc_feature 1..54: note = U/M: U (0.29:0.88) in Dermal Fibroblasts
  misc_feature 1..54: note = source = chr11:72415227-72415280; Gene: ARAP1 (exon)
  source 1..54: mol_type = genomic DNA
cgggtggtagcggcggtacttgccctcacggtacttggcctccaggtggcaccg

SEQ ID NO: 4694 - DNA, 74 bp, Homo sapiens
  misc_feature 1..74: note = U/M: U (0.32:0.91) in Dermal Fibroblasts
  misc_feature 1..74: note = source = chr14:101864895-101864968; Gene: DIO3OS (Intergenic)
  source 1..74: mol_type = genomic DNA
cgcctgtgtcctttccactacgccgcagaaactgtgcagccgcactgctgtttttaattacaaagtttaagtcg

SEQ ID NO: 4695 - DNA, 148 bp, Homo sapiens
  misc_feature 1..148: note = U/M: U (0.3:0.89) in Dermal Fibroblasts
  misc_feature 1..148: note = source = chr18:73888077-73888224; Gene: LOC339298 (Intergenic)
  source 1..148: mol_type = genomic DNA
cgcgtttcaggtcctcctctgcacattacggagctggtgtgatgccttccgggcaacatctcctagttaccatgagctccattaagaagagaccaagtcagtcttgttccctcattaaccatccattggcacggtcccacgtcctgcg

SEQ ID NO: 4696 - DNA, 259 bp, Homo sapiens
  misc_feature 1..259: note = U/M: U (0.34:0.93) in Dermal Fibroblasts
  misc_feature 1..259: note = source = chr2:165655267-165655525; Gene: COBLL1 (intron)
  source 1..259: mol_type = genomic DNA
cgcctgtaatcccagcactttgggaggccaaggcaggcggatcacgaggtcaggagatcgagaccaccctggctaacacggtgaaaccccgtctctactaacaatacaaaaaaattagccgggcaaggtggcgcacgtctgtagtcccagatactcgggaggctgaggcaggagaatggcgtgaacccgggaggcagagcttgcagtgagccaagatcgcgccactgcatcccagcctgggtgacagagcaagactccg

SEQ ID NO: 4697 - DNA, 329 bp, Homo sapiens
  misc_feature 1..329: note = U/M: U (0.2:0.79) in Dermal Fibroblasts
  misc_feature 1..329: note = source = chr8:41328179-41328507; Gene: GOLGA7 (Intergenic)
  source 1..329: mol_type = genomic DNA
cgttatgcccaagagtgttgagtttgtgtatgtagcctggcctgaaataaccggttttctagaatcgggcctcctgctgagcttaaaggaaatcccatcatttctcagtaccttaatttcccttttcacaaaattgaaattagaactgcttgcctcactggaggactctctgaggactcactagttgacatctgtaaatattttgaggctgaaaatgattatgaaaatcagatgtgcaactatccacatgtgcctgacgtatgtactgaaaccagaaagggtcttccacaaatcagggtgtgggtgtgaaagggacttaatacaagtcg

SEQ ID NO: 4698 - DNA, 337 bp, Homo sapiens
  misc_feature 1..337: note = U/M: U (0.26:0.85) in Dermal Fibroblasts
  misc_feature 1..337: note = source = chr16:68396507-68396843; Gene: SMPD3 (intron)
  source 1..337: mol_type = genomic DNA
cgccaggtctgtgagtgcctggacggatgcaaaaggggcacccggcgaggcagggcctgcaaacatgggcttccacaaggttttcatcagccttaagataaatacactaatgacattcaggacattgttacagctcagaaatggaatccatcactgtcctttgcccttgataattaattccagcatcaatgatctgagagctactggtagtcatttttaaatcatcatctcataaaaagaattttctcagcataggatgatgtttcaaatttagtctataatctaattaattggctcaaattagctgcaaggaaccatcgctgtgactgcagtctcg

SEQ ID NO: 4699 - DNA, 57 bp, Homo sapiens
  misc_feature 1..57: note = U/M: U (0.29:0.87) in Dermal Fibroblasts
  misc_feature 1..57: note = source = chr15:89270476-89270532; Gene: ACAN (Intergenic)
  source 1..57: mol_type = genomic DNA
cggagcttgcaagatcgcaccactgtactccagcctgggcgacagagcgagactccg

SEQ ID NO: 4700 - DNA, 181 bp, Homo sapiens
  misc_feature 1..181: note = U/M: U (0.31:0.89) in Dermal Fibroblasts
  misc_feature 1..181: note = source = chr13:101717738-101717918; Gene: NALCN (exon)
  source 1..181: mol_type = genomic DNA
cgaaagcctgccttgtacctcaggacatcatggaaggtgacgtcgccgccattgtggagcctctccatttcgtagcacatgtgcttaaacaggagcttgtccttgtccaggtccacctccagcctcccacgcagtagccgcagcaggaacttgacgcggaacgtggggatcaccccctgcg

SEQ ID NO: 4701 - DNA, 387 bp, Homo sapiens
  misc_feature 1..387: note = U/M: U (0.27:0.85) in Dermal Fibroblasts
  misc_feature 1..387: note = source = chr21:46248887-46249273; Gene: SUMO3 (Intergenic)
  source 1..387: mol_type = genomic DNA
cggagcaagctctttccagcctacattcttactgaagacaacggaaagctctggataacacataaaaaagtatctgaggactcgggaaagttaacagtaggaagcaaattagggaatgagactgaaacacaaagaaaaagctggtgagtgatcccaagtatttttcgtctttcatcacccagcttagaccgcaggctgacccctgtgtggaactgcacaacatgtgtggacagaaaaaactacaaaagaaattgttttttttctggccagaggaaaagagaccctgcaagccaaagcatgtggattgaattcagattttttgtttggtttggtttttcacttttttaatctttcccagccctctcccaagagtgtcccgtcatagcg

SEQ ID NO: 4702 - DNA, 173 bp, Homo sapiens
  misc_feature 1..173: note = U/M: U (0.37:0.94) in Dermal Fibroblasts
  misc_feature 1..173: note = source = chr1:87338081-87338253; Gene: SEP15 (intron)
  source 1..173: mol_type = genomic DNA
cgctcttgttgcccaggctggaatgcaattgcacgatcttggctcaccgcaacctccgcctctcgggttcaggcgattctcctgcctcagcctcccgagcagctgggattacaggcatgcgccacaacgcccagctaatgtttttttttttttttgtatttttagtaaagacg

SEQ ID NO: 4703 - DNA, 240 bp, Homo sapiens
  misc_feature 1..240: note = U/M: U (0.23:0.8) in Dermal Fibroblasts
  misc_feature 1..240: note = source = chr1:71240943-71241182; Gene: ZRANB2-AS1 (Intergenic)
  source 1..240: mol_type = genomic DNA
cgcctattcgtttttcttaatatagaaccttatttttggcttttagtttttgactcttatattgcataacaaattttaagggctaatgagtgcctgcccacgtccatttccatatggtctaaaaaagtttaattggctatcagtcttttggctctaagtcccgtggccaaaggaaatcccaaagaaacctgaaaaactaactcaaaccatgacaggaaatagggggtcagacatgcttcg

SEQ ID NO: 4704 - DNA, 371 bp, Homo sapiens
  misc_feature 1..371: note = U/M: U (0.23:0.8) in Dermal Fibroblasts
  misc_feature 1..371: note = source = chr3:72628306-72628676; Gene: RYBP (Intergenic)
  source 1..371: mol_type = genomic DNA
cgagacagccccatgcacgtggtggcccatgccataaaaatgtgtctctctcaaaaaacaaacaaacaaaacaccaaaattttgataaatgattatttatcttgaatgcaaaataaataaataaagcatctttctcacttactttggagacatgatttttaaatttgtttcctaactttccccaatctggcttccattagagaactattcccaaattaacctctgtgccctctcaagtaaagaatgcaagagatttctaccagctattttctcccatttcgaacatgccacgtgtgtttaacagcaggcagagatttccaggctagaagtggtagtaaagggatcttttagcaactgttctttgaaaatcg

SEQ ID NO: 4705 - DNA, 424 bp, Homo sapiens
  misc_feature 1..424: note = U/M: U (0.27:0.84) in Dermal Fibroblasts
  misc_feature 1..424: note = source = chr19:6207787-6208210; Gene: MLLT1 (Intergenic)
  source 1..424: mol_type = genomic DNA
cgccttgcatagctattggggaaatagagctggggccctacctcatggctgaataaattccagatggaacaaattgaaatgtgagaaagaaagagggaagggaggcaggaaaagggggaagaagaattgaattcctaggagaaatcatgggagaacttaaaataaaaacatcctaaataataaacaataacagcccaaaaaccatttcaaggaaaacttgatcacttgataatggatcacttgaggataggagttccagaccagcctgggtgagagtgatagtccatctcaaaaaaaaaaaaagaaagaaaaagagccaagcgcagtggcttacgcctgtaatcccaacactttgggaggccgaggtgggtggatcatgaggtcaggagttcaagaccagcctggccaagatggcgaaaccccg

SEQ ID NO: 4706 - DNA, 442 bp, Homo sapiens
  misc_feature 1..442: note = U/M: U (0.32:0.89) in Dermal Fibroblasts
  misc_feature 1..442: note = source = chr8:144457024-144457465; Gene: RHPN1 (intron)
  source 1..442: mol_type = genomic DNA
cgctgggcacgccccactctttcgccatggctggtgctgggcagggccgcggggctgcagtctgggtgcaaggctcagagtcatttctctgtggatagggagggcacgggtgtgcgttcgcttcgagaaccattcccaaagtcagaccgcagcctctgcaccaaccatcgggggccagtggccgcccccagagcctcagggaccctgtcctttgagcccacgcctaaacccacatgggaatgatttggaggcgtgggtgagttggatgggaaaaaaattgggaggggcaagggggggatccagaatgaaatccagaagcgcagaaggaaggctgtgaggagcagtgggccgcctcctgcagggctcccggagcccctacttgtccaggctgcctggtgagaccctggcttctggtgtccttggcaggtgccagcctcccccg

SEQ ID NO: 4707 - DNA, 239 bp, Homo sapiens
  misc_feature 1..239: note = U/M: U (0.31:0.87) in Dermal Fibroblasts
  misc_feature 1..239: note = source = chr16:86901654-86901892; Gene: FOXL1 (Intergenic)
  source 1..239: mol_type = genomic DNA
cgcagccaatctaaggggcaattttaaaatccccatgccaacacttctcaatccaaactcagggtgatcccctttggatggtggaaaggggactgcgcccttgagggcacttttcccaggccactgccccccaggtccagccactcgtagtggccgctgcccacagctggcaatggtaatggcatctggagacagggcggccgacaccctctgacctttgtgtgagggtgaggtgggcg

SEQ ID NO: 4708 - DNA, 426 bp, Homo sapiens
  misc_feature 1..426: note = U/M: U (0.29:0.85) in Dermal Fibroblasts
  misc_feature 1..426: note = source = chr19:8085903-8086328; Gene: ELAVL1 (Intergenic)
  source 1..426: mol_type = genomic DNA
cggcaaagtggactggtggccggaggagtgctggagggttctggagagaaggaggctgattccagatgtttaagatgtggggtcagcaggaccctgggtgaccagtgaaatgtggagaaggtggcagccaggtcaattagagacagatgtgggggaaagccattctctctcagaattctggagggttccatatatgggatggagttattctggggacatcataagaaatgggtgtgcctgtcaggcgagcagttcacttgtcagcccccacacagagctgaagcatcatagcccaccccagttcactgcccactctgaaaacagaagccgggcaagctccaaaaagccggaagaaccttctagaagccctgtgttcttctgaggcccaacttcaatctgatgccatctcaagcgccagtgagatcg

SEQ ID NO: 4709 - DNA, 479 bp, Homo sapiens
  misc_feature 1..479: note = U/M: U (0.26:0.82) in Dermal Fibroblasts
  misc_feature 1..479: note = source = chrX:3491869-3492347; Gene: PRKX (Intergenic)
  source 1..479: mol_type = genomic DNA
cgcactgcagcctgggcaatcatggaggctgaaaactgatctgctatctacaagtggagacccaggagagccggtggtgtagattccagcataaatttcagttggagtctgaaatatattaatattttgtattttgttaatataacggagattttatttttaatacaagactagtcagaccatgtcaaaggaagagagtccacatggcagaggggaagtcatcagggagcaatttaacagctgcctgcacactattttcctttctgtgctcatgcgtttggagaatacatctatggttaaggaattagatcatctctaatcttaacctatggtattgactataaacaggctccctgtaagctttggttatttgaacgtcaatttctgcagtggaagcaaattttaaaagtggaagctcaaattggggctcccatctgggcaccacgtgtctggaacgaccgttctgaaaatgggttacg

SEQ ID NO: 4710 - DNA, 218 bp, Homo sapiens
  misc_feature 1..218: note = U/M: U (0.27:0.82) in Dermal Fibroblasts
  misc_feature 1..218: note = source = chr18:65647088-65647305; Gene: DSEL (Intergenic)
  source 1..218: mol_type = genomic DNA
cggataaacgaaacgtgtgctatttaaaggatgttgaattatttacatagaaaaatgaaacaggattacaaggttatgttttcctcataatgaagagatctgatactgttttgcaaactgggaataaaacagcatgacatgattaaaaacatccggattccataacactgatacaacaaattctgaagaaactaaggcaatgtggagctgtgcacccg

SEQ ID NO: 4711 - DNA, 62 bp, Homo sapiens
  misc_feature 1..62: note = U/M: U (0.36:0.9) in Dermal Fibroblasts
  misc_feature 1..62: note = source = chr6:166249801-166249862; Gene: LINC00602 (Intergenic)
  source 1..62: mol_type = genomic DNA
cgagtgacaagagtctagcgcccactatgttcgttttgaaaagttctgaccggcgcacgtcg

SEQ ID NO: 4712 - DNA, 139 bp, Homo sapiens
  misc_feature 1..139: note = U/M: U (0.36:0.9) in Dermal Fibroblasts
  misc_feature 1..139: note = source = chr12:29543061-29543199; Gene: LOC101055625 (intron)
  source 1..139: mol_type = genomic DNA
cgacatatgataaaatagaaagtcacacatcttgtaaattctcatttgtttaaaagaaatcatagaaaacacatgtcttctggagatgacttttagaaatggagttgttaagacggcctctggaagcgatacgtccacg

SEQ ID NO: 4713 - DNA, 302 bp, Homo sapiens
  misc_feature 1..302: note = U/M: U (0.36:0.9) in Dermal Fibroblasts
  misc_feature 1..302: note = source = chr10:766464-766765; Gene: DIP2C (Intergenic)
  source 1..302: mol_type = genomic DNA
cggaactgagaaggcatctgctcactgcactagtgtccgcagcagggccggaaagagatgatcttcgcctgtacacttcatggagtcttgaattaattatccgaacttccactttaggttcctaatcatttaaacacaaaaaagagcggggagagccttttcgtgtggtcagaaacaaatctcctttgagtgtgtatttcattctcggtgccatgatttaagggatgagatggcattttgtagaagtaaaaagagacagagatagaaatacaaaacatactggagctgaagtttctgcttcg

SEQ ID NO: 4714 - DNA, 193 bp, Homo sapiens
  misc_feature 1..193: note = U/M: U (0.35:0.88) in Dermal Fibroblasts
  misc_feature 1..193: note = source = chr3:21847797-21847989; Gene: ZNF385D (Intergenic)
  source 1..193: mol_type = genomic DNA
cgccattctactgcctcagtctcccgagcagctgggactacaggcgcctgtcaccacgcccgactaatttgttgttatttttagtagagacggggtttcaccgtgtgagccaggatggtctcgatctcctgacctcgtgatgcacccacctcggcctcccagagtgctgggattacaggcgtgagccaccgcg

SEQ ID NO: 4715 - DNA, 110 bp, Homo sapiens
  misc_feature 1..110: note = U/M: U (0.39:0.9) in Dermal Fibroblasts
  misc_feature 1..110: note = source = chr15:98648149-98648258; Gene: ARRDC4 (Intergenic)
  source 1..110: mol_type = genomic DNA
cgctccacagtggcccggcagtcagcacgcgaccaggcccgcagagcgcgcagagcccggccgctgggccgccgcctgacccaggaagcgcagcgcgagctcccactccg

SEQ ID NO: 4716 - DNA, 353 bp, Homo sapiens
  misc_feature 1..353: note = U/M: U (0.33:0.84) in Dermal Fibroblasts
  misc_feature 1..353: note = source = chr2:232739219-232739571; Gene: MIR1471 (Intergenic)
  source 1..353: mol_type = genomic DNA
cgctagaggccatggcagagctgctgcccacaacaagactttgcaggccccatgggggctccttttgtgcgtccatgcccggcactcttctggaggacgccatctgttttgagataggctcttccactggggagctcctagcagagccttccagtcctgggagcctttctgggtctgtcagatgggcttacatagctgtgcagtttcctttccagactctttttgatcattcttggaaggcagacttttctccatctctacgttcttggggatttgaggaaagccttattggaagcatcagggagtgccggcagactctcacagagctaatctagtgctacaacagggcctcg

SEQ ID NO: 4717 - DNA, 263 bp, Homo sapiens
  misc_feature 1..263: note = U/M: U (0.4:0.9) in Dermal Fibroblasts
  misc_feature 1..263: note = source = chr5:62400816-62401078; Gene: LRRC70 (Intergenic)
  source 1..263: mol_type = genomic DNA
cgctcttgttgccaaggctggagtgcaatggcatgatctcagctcactgcaacctccgcctcctgggttcaagcaattctcctgcctcagcctcgcgaatagctgggattacaggcatgcgccaccatgcctggctaattttgtatttttagtagagacagggtttctcaatgttggtcaggctggtctcgaactcccgacctcaggtgatccacccgcctcggcctcccaaagtgctgggattacaggcatgagccaccgcg

SEQ ID NO: 4718 - DNA, 497 bp, Homo sapiens
  misc_feature 1..497: note = U/M: U (0.39:0.89) in Dermal Fibroblasts
  misc_feature 1..497: note = source = chr7:151097193-151097689; Gene: WDR86 (intron)
  source 1..497: mol_type = genomic DNA
cgatggacgtgtgtcctcggtacacctgcagacactgcccggtcagcacgtcccacctcctgatggtgcagtcggcgctgcatgtgaaggcagcctcatcctccagctggcagaaggtcacatagctttcatgtcctgcagatgagggacaggggagatgtgagcgtactggggatgccagctcctgcttttcttctgggaacaatgtttgaaaagggaagaaagcaggatgtagggagtgtttgagacaagctggagtcaattagcattagttttgttttgttttgtttttttgagacagagtctcactctgtcacaaggctggagtacagtggcgcgatctgggctcactgcaacctctgcctcccgggttcaagtgattctcctgcctcagcctcctgagtagctgagattacaggcgcataccactatacctggctaattctttgtatttttagtagagatggggtttcgccatgttagtcaggctggtctcg

SEQ ID NO: 4719 - DNA, 281 bp, Homo sapiens
  misc_feature 1..281: note = U/M: U (0.37:0.85) in Dermal Fibroblasts
  misc_feature 1..281: note = source = chr2:109698218-109698498; Gene: SH3RF3 (Intergenic)
  source 1..281: mol_type = genomic DNA
cgccgccagggagccctttttgcaaccacagtgcctggcagcagtgacatggcttgcagaaacacatccttgctattcagttgcacttgccaacgaggcatcttctggggtcttgtcggggagatcactgggggatggccagctgttttcataggaaaagtctgtctggttcttcatctccgtatttgtcctccacactgctcactgcatttctgcatcctggctttgtgtggggcatgctgctgtggactccagcatctgtcaacccaaatgcaaaggcg

SEQ ID NO: 4720 - DNA, 461 bp, Homo sapiens
  misc_feature 1..461: note = U/M: U (0.08:0.84) in Dermal Fibroblasts
  misc_feature 1..461: note = source = chr8:41118707-41119167; Gene: SFRP1 (TTS)
  source 1..461: mol_type = genomic DNA
cggtttggaggtgacttactgatcagggaactacatccactgaagttgtcactgtaattgcttgcagaattagaagtcacatggaagaattcctgaggcaagaagcacataacctaatatgaaacagcttgggctgggtatggtgcagcactctgagtccaaagggaagctcggcagggagcgcagacatcacgcctacgcaagtgggatgcaggagccctgggttctaattccaaccaggcgagtgacctgggagtcccagactagttgggaaatcccagctatatccccatcttacgttaaaagagtggatatgttcctctccaaggcctcctatgtgtctaagactccagataaggacaagttttccaattctagttggtaattctaacattgagttgagccggaggggaaagagaatgtttccatgagaaacatggaaaagaaattcaggcagggcc

SEQ ID NO: 4721 - DNA, 258 bp, Homo sapiens
  misc_feature 1..258: note = U/M: U (0.1:0.87) in Dermal Fibroblasts
  misc_feature 1..258: note = source = chr13:111770580-111770837; Gene: ARHGEF7 (intron)
  source 1..258: mol_type = genomic DNA
cgctcatttgttctgtttcagagttaggaagagggtggagggagcagagaggacgttcacggcgtgtcagattcttctgctcatttaaaggaaactttccacccaggttcccgctttgcttttaaggtggaaggttagacagtgagaagatggaattataaactttacatgaacagttcagaaaagagacacttttcattatactggacagatgttttctgctgtaggggagaggaaaatgggattaaaaagttttcg

SEQ ID NO: 4722 - DNA, 192 bp, Homo sapiens
  misc_feature 1..192: note = U/M: U (0.16:0.88) in Dermal Fibroblasts
  misc_feature 1..192: note = source = chr21:27843249-27843440; Gene: CYYR1 (intron)
  source 1..192: mol_type = genomic DNA
cgctgggcaggctgagggcgttcagccgagaacacagctctgtaaatacatcagcgaggatgcatatatacagtttccccagtgctccctcagacccttggaggctgggctactccaagctctgtttcctgcaaaaaaatggagtaagtcctgtggagtctaaatacacattccctctgcattatacccacg

SEQ ID NO: 4723 - DNA, 269 bp, Homo sapiens
  misc_feature 1..269: note = U/M: U (0.15:0.84) in Dermal Fibroblasts
  misc_feature 1..269: note = source = chr11:105695367-105695635; Gene: GRIA4 (intron)
  source 1..269: mol_type = genomic DNA
cgcagtggcagtatcatagccagtgaggtttatctgaagcacgattattactaattgaaaacagaatgtgcataaataacaagtcagttattcctccaggaagatctcgcaagaaatcaaggctagccttatctttgaagtatctccacaatcatctgtggggtacataatctacagccggagatacttaaggctttttattttgtgcctggtataagatggcagatgtgttgccacggccagtataatgatgcctctagggagcaacg

SEQ ID NO: 4724 - DNA, 426 bp, Homo sapiens
  misc_feature 1..426: note = U/M: U (0.18:0.83) in Dermal Fibroblasts
  misc_feature 1..426: note = source = chr12:13966164-13966589; Gene: GRIN2B (intron)
  source 1..426: mol_type = genomic DNA
cggcctgggaaattttatatgaaactggaaatcaaaaaaagtaaagaccaagcaataaagctatttagagtcatccattcgaatgctaaatatcagaattatgatataagggcagaataagagtgaggcaaaaatcggaaccagatggcaaaggaagcatgtgaatatgttgtaaattccaaacattactacacttctgggacgctgggtaccaagaattggaaacaggatgaggagaaaatgtttgttggcagcaataacaacaaaagcagtgcaggaacatccaaataacagtaataataatagctagcattaatgagcccctactatgttccagtgccttacacatattctcactgcatcctaatgaccactctacaagattctacagcagatgaggaagccgaggtcagaaagatgaaggcg

SEQ ID NO: 4725 - DNA, 166 bp, Homo sapiens
  misc_feature 1..166: note = U/M: U (0.28:0.89) in Dermal Fibroblasts
  misc_feature 1..166: note = source = chr21:34314271-34314436; Gene: OLIG2 (Intergenic)
  source 1..166: mol_type = genomic DNA
cgtgttttgaaagcacctcacagatgggttctataattgagaaatgcatttgttctttgtttggtacatttaaataatgtgattcaaagtttggagttgaatgcctttctgaaatgacttccctccatctcgcacacacacggtagtgtgttttcacagaacggcg

SEQ ID NO: 4726 - DNA, 302 bp, Homo sapiens
  misc_feature 1..302: note = U/M: U (0.28:0.88) in Dermal Fibroblasts
  misc_feature 1..302: note = source = chr2:85289565-85289866; Gene: TCF7L1 (Intergenic)
  source 1..302: mol_type = genomic DNA
cgggcagatcacttgaagacaggagttcaagaccaacctggccaacatggtgaaaccctatctctactaaaagtacaaaaaattagccaggggcattggtgggtgactgtaacccccactactcaggaggctgaggcatgagaatcacttgaggaaggcagaggttgcagtgagccaagatcgcgccactgcactccggcctgggcaacacagtgagactctgtcaaaaaataaataaataaataaggaaagaaagagtgggatttgcttgggagcaaagacagagccagataacttctacg

SEQ ID NO: 4727 - DNA, 375 bp, Homo sapiens
  misc_feature 1..375: note = U/M: U (0.27:0.86) in Dermal Fibroblasts
  misc_feature 1..375: note = source = chr4:190748609-190748983; Gene: FRG1 (Intergenic)
  source 1..375: mol_type = genomic DNA
cggcaggtgaaggcacatatcattcatgcccagcaccaccatctaatgtgatcaatgcacaagaaggtgccgtgaaactttaacgctccatccaaatgttagtaattattattaacccagtgagactgagcagaaacctggaaccactggtcagagccgacatctggattcgatggtcagaaataaggacaccacgctgtatacctatttgatgattcatgtctgtctggcccaggataagaaataccctttcaaaatcatcaacccctgggcagacatgttttatctccctgaaccaattacagttaattctcccgggttcacatagtttgggaccaagtctatttcacacaaaactgaatactccagacaacg

SEQ ID NO: 4728 - DNA, 146 bp, Homo sapiens
  misc_feature 1..146: note = U/M: U (0.19:0.88) in Dermal Fibroblasts
  misc_feature 1..146: note = source = chr6:9564844-9564989; Gene: LOC100130275 (Intergenic)
  source 1..146: mol_type = genomic DNA
cggtctgcccccaataaattgcttctcctagcctcctatatataaaccatacttacttgcgacctaaagtatcctaacttgtgttaacatatccttgcgcgtgtgttttctatgggtctacacgtgtgatacctgtattcctagcc

SEQ ID NO: 4729 - DNA, 176 bp, Homo sapiens
  misc_feature 1..176: note = U/M: U (0.11:0.88) in Dermal Fibroblasts
  misc_feature 1..176: note = source = chr20:20913889-20914064; Gene: PLK1S1 (Intergenic)
  source 1..176: mol_type = genomic DNA
cgataaagatgcagaagggaattaggtcatcaggcatgctcctttttcttttaataaccccatccaacctcctgcttcttaatctcatgcagacaaaagcaatagaagctaagccttccagagccgtgataggaaaggcggacgcgcaaatccaccaacatacatcctttcactcg

SEQ ID NO: 4730 - DNA, 306 bp, Homo sapiens
  misc_feature 1..306: note = U/M: U (0.19:0.91) in Dermal Fibroblasts
  misc_feature 1..306: note = source = chr12:14819230-14819535; Gene: GUCY2C (intron)
  source 1..306: mol_type = genomic DNA
cgctatattgggtggacctggcttttagtacagctgcgggcattcatctacgcaagcttccagcttgcttatttatgcttgcagttcagcttttcaggctgctttttgctagaaaagaaatggtttggagactgttttcaattaaaagaaaatgcctggctgggcgccgtggctcatgcctgtaatctcagaactttgggaggccgaggcaggcggatcacgtgaggtcaggagttccagaccagccagcccaacatggcgaaaccccgtctctactaaaaatacaaaaattagccgggcgtggcg

SEQ ID NO: 4731 - DNA, 188 bp, Homo sapiens
  misc_feature 1..188: note = U/M: U (0.17:0.86) in Dermal Fibroblasts
  misc_feature 1..188: note = source = chr13:114075763-114075950; Gene: ADPRHL1 (TTS)
  source 1..188: mol_type = genomic DNA
cgcccatccccgggacatgcctacccccaggacacctctacccctgggacacgcctgctccttgcactgaatgaatgcaggggtcatttccatcaaggggaggcggccggggagtgaggcgcctggaagtggttggcggggctggcccgggaagcctggacccaatgcacctgggagctgggagtccg

SEQ ID NO: 4732 - DNA, 309 bp, Homo sapiens
  misc_feature 1..309: note = U/M: U (0.15:0.83) in Dermal Fibroblasts
  misc_feature 1..309: note = source = chr9:77399441-77399749; Gene: TRPM6 (intron)
  source 1..309: mol_type = genomic DNA
cgatttaagagtgtgatggtaggggagagtcagtgagtgatacaagaataaacggatattttagcagaaaatatcattggtggtagcctcacatgaatctcgtccttgggaattactgtgctcagagacagatttgactcaatcccataccatctggtcctaatcaaaagggtaagctgagtgtcccaacaaactaactatgcaatatactatccaaggtcatttgctaatactagtttgtggttatatggaaggcagtggtgacatgatcttgctcgctgtgcttctataaataattccaagatagcg

SEQ ID NO: 4733 - DNA, 340 bp, Homo sapiens
  misc_feature 1..340: note = U/M: U (0.17:0.84) in Dermal Fibroblasts
  misc_feature 1..340: note = source = chr11:64427940-64428279; Gene: NRXN2 (intron)
  source 1..340: mol_type = genomic DNA
cgtgtgcatggcgttaggcagcatgatcttcatgtacatggagccatcgtagctcaggaccgtggcctctgcccacaggagttggggaagagggaaggagaagacaggcagaggccaggggagggagaagaccagagaatcattacaagggcgaaaagcctagggcaggtctatgaggggttcccctaggaggaggtggcacagggatggaaagtaggagtcaccctgagaaggaggagcacagggatagggagcagggacacctaggatgaagaccagcctcacctctctcacagacccgcccaagaaagccggtcccgatgcagtcacagatgaagcg

SEQ ID NO: 4734 - DNA, 384 bp, Homo sapiens
  misc_feature 1..384: note = U/M: U (0.24:0.89) in Dermal Fibroblasts
  misc_feature 1..384: note = source = chr22:23138766-23139149; Gene: MIR650 (Intergenic)
  source 1..384: mol_type = genomic DNA
cggggaagggaaatcttctccgtggacagaactttgagccgtgccactgggtgtgcactttgcatggaaggattttagccaactacattctaaaggttattgccacaactttgatcttaaataacagtgcagcgaacatccctgcatccctgcatggaaggaatgccatttcccataaatcaccaaatcactcagaatgactacgcataagcccttaatatacgccagatgcattggttattgttttacaagcgggacctcaagaagactttcataatacggaataggatgatgcaaagccctatgctcaaggcccgatctttactagaaaactagtattgggaggttacatgttttccccaaacagatctttgaggaatcccg

SEQ ID NO: 4735 - DNA, 157 bp, Homo sapiens
  misc_feature 1..157: note = U/M: U (0.29:0.88) in Dermal Fibroblasts
  misc_feature 1..157: note = source = chr16:84823111-84823267; Gene: CRISPLD2 (Intergenic)
  source 1..157: mol_type = genomic DNA
cgcacgtgtacacctcagtggctttttacacatttagacgtgtgtaagtgtatagagcatttccacaccccagaggccccgagctcactccctcccgctctccccatccctgacgctaacctgatgcctgttgtcgtacatcagcttctcaacctcg

SEQ ID NO: 4736 - DNA, 282 bp, Homo sapiens
  misc_feature 1..282: note = U/M: U (0.28:0.86) in Dermal Fibroblasts
  misc_feature 1..282: note = source = chr14:88527213-88527494; Gene: LOC283587 (intron)
  source 1..282: mol_type = genomic DNA
cgaaatacttcccttagctttcgatttattttgaggtccttggccataaggagaatttttctgcaagttgtaaaaaagtaaaactgttgttgacaaccctttcaatgtccttcatttaagaatgcatgttttaaatttctcttacgatttagggagaaaaaatcatttaatacaaatgagtttacaatgaaaccaaagtgtttctcttggttttcagaaagatgagaaacaaaaatcagtaagcattttcttctgcttaaaataattatttgcggccagacg

SEQ ID NO: 4737 - DNA, 183 bp, Homo sapiens
  misc_feature 1..183: note = U/M: U (0.31:0.88) in Dermal Fibroblasts
  misc_feature 1..183: note = source = chr20:16542545-16542727; Gene: KIF16B (intron)
  source 1..183: mol_type = genomic DNA
cgtaccagagaagactcaggagacatgctacatttagatgcaatgtgggatcccggattggatgctgaaccagaaggaagacattagtgggaaaactggtgaaatctagataaaatttagttaatttcttcgttttgatcattgtgctgtggttacataaggcataatattacgggaagttcg

SEQ ID NO: 4738 - DNA, 204 bp, Homo sapiens
  misc_feature 1..204: note = U/M: U (0.34:0.89) in Dermal Fibroblasts
  misc_feature 1..204: note = source = chr5:177708296-177708499; Gene: COL23A1 (intron)
  source 1..204: mol_type = genomic DNA
cgtgtgaacgtgcggtgctccatgggcctttcttgttcacttgattaattccaaaccgtccatccgagtccttcatttcaaaattggtcccaggccgaggccccgtctcacagaccacatttcagcccagagctctcgcagtcccctggggccccggctgtcgctgctcccaggactgaggccggagatgaagtgcagtcaccg

SEQ ID NO: 4739 - DNA, 375 bp, Homo sapiens
  misc_feature 1..375: note = U/M: U (0.36:0.89) in Dermal Fibroblasts
  misc_feature 1..375: note = source = chr8:136440032-136440406; Gene: KHDRBS3 (Intergenic)
  source 1..375: mol_type = genomic DNA
cgtagtgtccaagggaccttccaggcagcttgcacaagcctctcctcctccaaggatggaatctccctgccacccacactgccacgtctctgcccgattccttcatgaagggcgacaatgcctcccggacacacaccccatatttccaaggctctgacagctttgtgctcctcatgcagccttcagacaggcgccctccccaccttcctcccggcactccgtcgctcccgctgaccaccatcatgctataccatgccgggttttgaggggtgagctgctaatgggaatgaatgtggcttgtatcatgtttaggagggaagcatccccatctggtatccagaggctggggtttagctcagctcccatctggctccg

SEQ ID NO: 4740 - DNA, 127 bp, Homo sapiens
  misc_feature 1..127: note = U/M: U (0.37:0.86) in Dermal Fibroblasts
  misc_feature 1..127: note = source = chr10:112326274-112326400; Gene: SMC3 (Intergenic)
  source 1..127: mol_type = genomic DNA
cgacgcccagctaatttttgtatttcgagtagagacgggggtttcgccatgctggccaggctggtcttgaactcgtgacctcaggtgatcctcccccctcagcctcccaaagtgctgggattacacg

SEQ ID NO: 4741 - DNA, 259 bp, Homo sapiens
  misc_feature 1..259: note = U/M: U (0.39:0.87) in Dermal Fibroblasts
  misc_feature 1..259: note = source = chr20:41965620-41965878; Gene: SRSF6 (Intergenic)
  source 1..259: mol_type = genomic DNA
cggatatttatcgcagtattactgtctcctcccagaggtccccacatctgattcatagtcacttgactcgggggtgcttgttaaaaggcagcttcccaggccccacccttggggattccagggtgagacccccagactgctatcttcctcccatgccccagctggctgtggtctccagtggggtttggaagctgccgctccaccagcccttcttccacggcctaaagatagacatgcgctcagggctgtgcggagcccg

SEQ ID NO: 4742 - DNA, 186 bp, Homo sapiens
  misc_feature 1..186: note = U/M: M (0.85:0.12) in Dermal Fibroblasts
  misc_feature 1..186: note = source = chr7:27241913-27242098; Gene: HOTTIP (exon)
  source 1..186: mol_type = genomic DNA
cgtggggtttttggggcggtgtttaccgactcttctctgcctccgccctgctcagccagggctttgagcctcttcggttttccggccagacccggaaaaacgaaaacacagcttggggagcccccactagccggcgcctgtgccagctcacctctggccatggcgcagctgccggtgcacacggcg

SEQ ID NO: 4743 - DNA, 346 bp, Homo sapiens
  misc_feature 1..346: note = U/M: M (0.89:0.17) in Dermal Fibroblasts
  misc_feature 1..346: note = source = chr7:27242911-27243256; Gene: HOTTIP (intron)
  source 1..346: mol_type = genomic DNA
cggcaaggtcaagatttgcttgcctgccaaggtagtgggtcctgatcttctgagctgtctgtccctctgattttttgttctccaggctcaggaattcctataggattgcagaggcaccttcaacctgataattttatattctcaggctcctcctgggttagactggggaagccagggcacccactaggatcggccggcagcggtggcaccttaggcatgacagccaagcagagggctgcatgagtagaggtgggagaggtgggagaggctgcagtcacttcccaggtactgtctggtgcactgatttccccggaggagccctgagagggcagtgcaggcaggaccg

SEQ ID NO: 4744 - DNA, 495 bp, Homo sapiens
  misc_feature 1..495: note = U/M: M (0.73:0.05) in Dermal Fibroblasts
  misc_feature 1..495: note = source = chr2:106886214-106886708; Gene: UXS1 (Intergenic)
  source 1..495: mol_type = genomic DNA
cggtcctgcaaggtcagccagacggggagcgtgcttcagggagacagcgagttcagcgctcggtggagcagcaccgtcggccaggtgcatggtcactgaacagaggagcccaggcccacagccaacaggaacacgggaagtgactggcccatgtactagaagtcgtatttactctgtgtccgtcaacccgcgccagctgtcagctcacggctctcggccgcctttgggtggagggagggcgttgccagagcagcatcataaagtacataggtctgcccacgtcgggacgcgtgggtccgcgtctgcaggttcctatcgctccccgttttctgaatattgggagatattccacaccctggtcacactccctaacccagctcgctccaggcgtcccacgctcagcgttcagggtcacctccctgcaccctggccggccccgccccaccaaaccacgcccacctaccgaacccaccccccaccgaaccaagcctggcg

SEQ ID NO: 4745 - DNA, 298 bp, Homo sapiens
  misc_feature 1..298: note = U/M: M (0.54:0.04) in Dermal Fibroblasts
  misc_feature 1..298: note = source = chr12:115130140-115130437; Gene: TBX3 (Intergenic)
  source 1..298: mol_type = genomic DNA
cgctgcacaggcccgcaggagagcaaagaggtctcggacaggctgtccttccccagctctcggtcgcgacaaggtcccgacaggcccgggaaccggcgaaccgcctgcaggtaaccctgcgctgggtacctgccttccctctccagctaccggggcggggcgcggcgcggcgcggcgcggcgcggcgggctgcccgggtgggggatgaagaaagcacggcggacccagggcagcgaagcgcaggtctttttccttttgagaactaagatcaagattgcagggattcagttagaagccg

SEQ ID NO: 4746 - DNA, 82 bp, Homo sapiens
  misc_feature 1..82: note = U/M: M (0.77:0.39) in Dermal Fibroblasts
  misc_feature 1..82: note = source = chr1:148604014-148604095; Gene: PPIAL4E (Intergenic)
  source 1..82: mol_type = genomic DNA
cgatgccctgcgccggggcaccagggcacgggcaaagccctccccctacacaaagcaagggtgttatgcctacaaccgaacg

SEQ ID NO: 4747 - DNA, 436 bp, Homo sapiens
  misc_feature 1..436: note = U/M: M (0.91:0.57) in Dermal Fibroblasts
  misc_feature 1..436: note = source = chr4:190991531-190991966; Gene: DUX4L6 (promoter-TSS)
  source 1..436: mol_type = genomic DNA
cggcccccgaaaggctggccatgccgactgtttgctcccggagctctgcgggcacccggaaacatgcagggaagggtgcaagcccggcatggtgccttcgctctccttgccaggttccaaaccggccacactgcagactccccacgttgccgcacgcgggaatccatcgtcaggccatcacgccggggaggcatctcctctctggggtctcgctctggtcttctacgtggaaatgaacgagagccacacgcctgcgtgtgcgagaccgtcccggcaacggcgacgcccacaggcattgcctccttcacggagagagggcctggcacactcaagactcccacggaggttcagttccacactcccctccaccctcccaggctggtttctccctgctgccgacgcgtgggagcccagagagcggcttcccgttcccgcg

SEQ ID NO: 4748 - DNA, 471 bp, Homo sapiens
  misc_feature 1..471: note = U/M: M (0.7:0.12) in Dermal Fibroblasts
  misc_feature 1..471: note = source = chr11:44333794-44334264; Gene: ALX4 (Intergenic)
  source 1..471: mol_type = genomic DNA
cggtttcttcaagttcctagaacctgccaaggtctctagcctgtgcactgtagcataggtggtttcccctacctggaattccctaaactcattcctgcacttttgtctggctaatgattcagagttcagcctagagcatcttcctctaggaagacttcccgtctctcctagtttaagttgacgcttccgtttgcctcatctccgtcccagatctcgtggttgtctggttgcctggctatgagtgtatctcaaccccactagttgccccagggcagcctcctacgtgcctggcaccccacaaatatttgtggaataaaagattaaacctggaccaggcgcggtggctcacacctgtaatcccagcactttaggaggccaaggaggatggatcacaaggtcaggagatcgacaccatcctggctaacacggtgaaaccctgtctctactaaaaatacaaaaattagccagacg

SEQ ID NO: 4749 - DNA, 442 bp, Homo sapiens
  misc_feature 1..442: note = U/M: M (0.95:0.13) in Dermal Fibroblasts
  misc_feature 1..442: note = source = chr2:119592075-119592516; Gene: EN1 (Intergenic)
  source 1..442: mol_type = genomic DNA
cgacagagctgtgagcctccgcctgctgagaggagggcacttgggcggacctgaagttaagaggcccggggtgaaggccagagctcaatctgcagggatagaaggcgcgggaaatccagcaaaggatggaagaacagtccctgccaggccgcggcctcctcgcccccgcctgcccggcctcacccttctggaagttcctccaggcctgggtgggggccgccagggaaggcgcagagggagggcaagttggcgccgctagttttagagaaatcctaagtaaacagtgaacccgagcaggaaacctcagctttgcctgggtaagagaactggccacacagctccaagaaaggagaggaggagaacaaatctctgcgccctgaggatggtggctttattgcggaaagaggtggtggggccggagctgctctgcaacttcctctcg

SEQ ID NO: 4750 - DNA, 369 bp, Homo sapiens
  misc_feature 1..369: note = U/M: M (0.89:0.08) in Dermal Fibroblasts
  misc_feature 1..369: note = source = chr3:157815256-157815624; Gene: SHOX2 (exon)
  source 1..369: mol_type = genomic DNA
cgagaatcgtctgggttgtttttccatatttttaaatgtataaaatactttaattttaaaatttgtttttgctccttggttctccaatttcagcttctgccaaatagcagttaagaaataagttcccttcctctttttctctcccgtttgtctttcgatttttttgtttgctcattttttcattgttaacaagatttttttttctatgcaagagtccatcgttgcagctttgcggtgagccaaactccgcggttccagcactcccctgtccagtctctctccagactcccccaaacccgctcctacaaaacccaattctaggccctcgagtaggaaaacgggcaggagccacggagcctgcgtgcctcg

SEQ ID NO: 4751 - DNA, 387 bp, Homo sapiens
  misc_feature 1..387: note = U/M: M (0.84:0.06) in Dermal Fibroblasts
  misc_feature 1..387: note = source = chr2:119592543-119592929; Gene: EN1 (Intergenic)
  source 1..387: mol_type = genomic DNA
cgcagcgaggatttcagaaggggctcacctggtgcaggaaaagttcagttggcagcccttcgcgagcaggtcctccccagcccgcaccgagaaggcaggcgcccgggccctctgactccagtggctcagagccggctcaggactggcagggcgaggagccggcgggccgagccagcgagggtttgggctgcccgcggtgtgtgtgcaagagcgcgcgcctcgtgtaaccattcaggaccagttgaagcaacacaaataaagtcaggtctcttcagccttgctgtccacccctccccctcttcctggtttgaccctggcctggccgctctgaggcccagtttgcgcagccgacattgcgtggctactctcattaccaggggaagggcg

SEQ ID NO: 4752 - DNA, 257 bp, Homo sapiens
  misc_feature 1..257: note = U/M: M (0.91:0.16) in Dermal Fibroblasts
  misc_feature 1..257: note = source = chr1:119535707-119535963; Gene: TBX15 (Intergenic)
  source 1..257: mol_type = genomic DNA
cggcagagccggggccggcgggccgcaaaattgcgcgattgttcgctgacttcggtctgcgcaggagcagggcccctccacaaagggagccttgtgtggccaggccggagcggccgcgcccaagaggtgaggaaatcctgttcccccaggcccagcttctctttccccacggcgtttcgtgcaacgccgcagcccgaccttcgactgcagggtgcgcccgccgttccaggcgccagctccggtcctgcctgccttcg

SEQ ID NO: 4753 - DNA, 390 bp, Homo sapiens
  misc_feature 1..390: note = U/M: M (0.83:0.09) in Dermal Fibroblasts
  misc_feature 1..390: note = source = chr2:119614187-119614576; Gene: EN1 (Intergenic)
  source 1..390: mol_type = genomic DNA
cgggaggcttagatgagaagacagcacccgggcagcggtcagtgttagagagaggacccgtaagaagggccgaggctagagggagagcgaagactgagccaacgacgcacctgagccctggggtgggggtggagacgtggctcctaacccaaatctccctgccaggcagtgtccgacgagcatcgacggcaggcgtcgagaccagtgcagggtagctcagacctcaagccacgcttgacctttccatgaaatgaataaaactcgaaagccagggaaaggggacagtactttgatccggagatcgcttataacctctgcttggagttccgagttcgtgcggctcaagggaggctacagtccagcaagctctgggctccaagcgtggggacg

SEQ ID NO: 4754 - DNA, 380 bp, Homo sapiens
  misc_feature 1..380: note = U/M: M (0.84:0.11) in Dermal Fibroblasts
  misc_feature 1..380: note = source = chr3:157816222-157816601; Gene: SHOX2 (intron)
  source 1..380: mol_type = genomic DNA
cgacagtgaccttctcagcctgttgctgaatctggggttccacatggatactccagtgtcccctgggtctccgaaactcgcttagggtaggcttatttccccggaccccgggaacccccttctgcaggaatgtggccgtctcccctgggaactgggctgaaatggtatattggaaagactgcgggtgaggacccttaccctcttctcttgatgctgccatgcatctcttaccccactaccaaaacaacggagtatcaacaagcaaactacgcaactttttaatgtcattcagggaagttactccatcttcaccacaataggcacaattgtgagtcggtacttctaacctttattgccataacaattacccagggatctcg

SEQ ID NO: 4755 - DNA, 111 bp, Homo sapiens
  misc_feature 1..111: note = U/M: M (0.8:0.1) in Dermal Fibroblasts
  misc_feature 1..111: note = source = chr7:27232857-27232967; Gene: HOXA13 (Intergenic)
  source 1..111: mol_type = genomic DNA
cgctttacaccggcctgagcctccattttgagtagggggttcttgtagaagcgtggagggtttggggccgcgcctctgtccccgaggggcgcgacatcaggtagctctccg

SEQ ID NO: 4756 - DNA, 218 bp, Homo sapiens
  misc_feature 1..218: note = U/M: M (0.85:0.15) in Dermal Fibroblasts
  misc_feature 1..218: note = source = chr2:175207943-175208160; Gene: SP9 (Intergenic)
  source 1..218: mol_type = genomic DNA
cgcttctccataattttaaccgttcagtgttatttaccccccacccttcccagacgctggagtgtatagaaatatgtatgaggtaaatacatacagacatgcctcccccatatattgttgatgtaaatatagactgtgtgtttgcatctccagttaaggaaagggtttcagaatgtccgtggggacacgtccctccagggccggctgtcgaggacccg

SEQ ID NO: 4757 - DNA, 369 bp, Homo sapiens
  misc_feature 1..369: note = U/M: M (0.86:0.16) in Dermal Fibroblasts
  misc_feature 1..369: note = source = chr2:175195675-175196043; Gene: LOC285084 (TTS)
  source 1..369: mol_type = genomic DNA
cgtgctgacctgataatcactgctctagtgaagatcatgcaaatgaaaagcataattaattgcacaaatgatttaaaaaggagcgctgtggctttgcaaataaataaaggcagttgggaggacaggtcagataaatgctttttataggctgggctcccttcacccccacccccgcctcctggtcccggtggtccagactttgactgcagccagcctggccaaggcgagcaccttccgttcctcctcccctaacgcctccccttcaaccttattccggagtccccctaactccacctcaccccaccccaacctcaccccaccccagtggtgtatacccgctgctagactctgtgctaggtcaaagctccg

SEQ ID NO: 4758 - DNA, 163 bp, Homo sapiens
  misc_feature 1..163: note = U/M: M (0.81:0.12) in Dermal Fibroblasts
  misc_feature 1..163: note = source = chr2:175208488-175208650; Gene: SP9 (Intergenic)
  source 1..163: mol_type = genomic DNA
cgaggcccggcaagcttaggcggggactagcagggccctcggcgggcgggcccccagcgaaaaggcctgagaattgcttctggggggtggcttgggccaacgggggcgagggagccgcgcagagggcaggccccgacccttccccgccgcaccttgtgggtcg

SEQ ID NO: 4759 - DNA, 265 bp, Homo sapiens
  misc_feature 1..265: note = U/M: M (0.76:0.07) in Dermal Fibroblasts
  misc_feature 1..265: note = source = chr2:119614594-119614858; Gene: EN1 (Intergenic)
  source 1..265: mol_type = genomic DNA
cgcacccctcgggaagccccggaacggtcctcgccagacatagccggctgtcctggtccttagcttcaggctggcggcgcaaggccagagcggctgccttctaggcacctgggtggaggtctcgcatagcattccctgagaagcgaaactgcccttggggccgcagcgagcctgccacatcgaactggagaccctctgctttcgggatagatgggacgtttctgctctgtccttcttggagtcccggaatcgttctggggccgcg

SEQ ID NO: 4760 - DNA, 198 bp, Homo sapiens
  misc_feature 1..198: note = U/M: M (0.85:0.17) in Dermal Fibroblasts
  misc_feature 1..198: note = source = chr7:27233045-27233242; Gene: HOXA13 (Intergenic)
  source 1..198: mol_type = genomic DNA
cgttgtaattatttctgcccagtggatccggctcttcagcgtcacgagagccgggcagaaatgaaatcaactgtggcaaggccttggctgctttcacggaggagtttttctgcgccagtgtctttttccttccctttaaaataaaattaaaaatagcaagcacttctcaggcattcatcagagatagatagatgcacg

SEQ ID NO: 4761 - DNA, 278 bp, Homo sapiens
  misc_feature 1..278: note = U/M: M (0.82:0.16) in Dermal Fibroblasts
  misc_feature 1..278: note = source = chr7:27237063-27237340; Gene: HOXA13 (exon)
  source 1..278: mol_type = genomic DNA
cggatattggagcagtaaatatagttcaaatgccacaaaatatgcttgttataagcaattaaaaattattcttaaaaagacattaccgacccgggttctcttgtagcctgaaaggttcagctggttggttttactatactaccaagacaaatgatcctcagaagagttttctctccctttctcccttcacagcaaatattccaagatcattatttcagtaccttctcgtttcccctctaaatctatacataaaatgttttgcagaacgtacaacaacg

SEQ ID NO: 4762 - DNA, 364 bp, Homo sapiens
  misc_feature 1..364: note = U/M: M (0.81:0.15) in Dermal Fibroblasts
  misc_feature 1..364: note = source = chr2:175196199-175196562; Gene: SP9 (Intergenic)
  source 1..364: mol_type = genomic DNA
cgattagcgctaatgaccgaattgtttccctggctttgcctgctaaacagagcaacttgagcagttgctcagatcaaagctcccgggagaggcaagatgggagaaacaatatttgttcaaaggaagtgaactcttccctttaattaccctattcttctttattaggaatcgtattgaatttttttgcaaaaaaattatgttggtttaaccatagtgtatttatgatgtaaatatattccaagatgaaaacgtcacggatcaattgtaaaggacccggatacataattttaaaaaatcagtttcagtgtatatgaggttctcaccccactttcgctgctcagtcagatttgtttatgcagaatcg

SEQ ID NO: 4763 - DNA, 376 bp, Homo sapiens
  misc_feature 1..376: note = U/M: M (0.72:0.11) in Dermal Fibroblasts
  misc_feature 1..376: note = source = chr7:27240758-27241133; Gene: HOTTIP (exon)
  source 1..376: mol_type = genomic DNA
cgcttctttgtggaccggacctgactctccaggaatctgggaacccgctatttcactctattttgggacaagaaaaaggggctctttggggccacttcctgccttcccctcaagtaggatctccagcctgcagagggtgcctagtccttctttgcccaagaaccagtccaagaagcctttcctctgtgcctgggaaatgcaaccttttcttgggagcatggtagggtgttggtgctgaagaaccaagcagcgacccgtcttgtagctgccatgttttgtcgaggggttctgggggtcctgctgctttagagccacatacttccacttcctgattcactactgtgagctggtcagatgcctagaagaggaacaagcg

SEQ ID NO: 4764 - DNA, 324 bp, Homo sapiens
  misc_feature 1..324: note = U/M: M (0.67:0.08) in Dermal Fibroblasts
  misc_feature 1..324: note = source = chr8:17271025-17271348; Gene: MTMR7 (promoter-TSS)
  source 1..324: mol_type = genomic DNA
cgcgacgcgcctctgcctggggttgccggggcgagggctgctcgctctctcttaacaggggcagccggcggagcactatacggccactgttctccgagacacaaagagggccttgttttgggtgtggcctcctggaagagagatggggagtacaggctgctccacaccgtccctgggcttccttctagggcgtcctgggatagctaggatttcagggtggggcagaaaagaaggctgccacagacactctagacccaggacggtcttgtaggctcaatgtgtgtgtttcatcccaggcgcggccggcatagcgctcggggtgcg

SEQ ID NO: 4765 - DNA, 201 bp, Homo sapiens
  misc_feature 1..201: note = U/M: M (0.67:0.1) in Dermal Fibroblasts
  misc_feature 1..201: note = source = chr2:119614872-119615072; Gene: EN1 (Intergenic)
  source 1..201: mol_type = genomic DNA
cggtgaatttcagggtcttgagaagccgcgcacacacgggattctgggcgagcgtcccgtctcttaattcctattaagagacgggaaaatcgagggactggaggtcccatcattgtcgcgtgagcagcctcctgaacaccaagcgagacctgagggttccgctggggcctcgccctgacacccgggccctccgtgtggtcg

SEQ ID NO: 4766 - DNA, 279 bp, Homo sapiens
  misc_feature 1..279: note = U/M: M (0.69:0.12) in Dermal Fibroblasts
  misc_feature 1..279: note = source = chr3:157812688-157812966; Gene: SHOX2 (TTS)
  source 1..279: mol_type = genomic DNA
cgcaggcagatgtttattattaaaaactaccgacgttcatcaaccaggagacccgcaaggcctgcgcactgaatacggcccaaatcctgttcagtggtctttgaaagttaaaagaaagaaacctatcgcccacgtctatgctgaggaacagctttgaatacgagctaagacctgggagagggccaagtgggggtggtggggaacactgctggaggatgtggggctttggcaggggttttacgcaccctccagcacgagggtggggggtcccaggggacg

SEQ ID NO: 4767 - DNA, 59 bp, Homo sapiens
  misc_feature 1..59: note = U/M: U (0.01:0.89) in Osteoblasts
  misc_feature 1..59: note = source = chr13:76765436-76765494; Gene: C13orf45 (Intergenic)
  source 1..59: mol_type = genomic DNA
cgcaaggctccacggcttcatttgtgaagtcagaccaagaacccacgaatttcgggcac

SEQ ID NO: 4768 - DNA, 354 bp, Homo sapiens
  misc_feature 1..354: note = U/M: U (0.05:0.93) in Osteoblasts
  misc_feature 1..354: note = source = chr6:143447049-143447402; Gene: AIG1 (intron)
  source 1..354: mol_type = genomic DNA
cgattttcagtaatgagatggagcagtatgaggtaaatatctatgcacaaaagcagggattctaaatcacattctgcaaaccacacatttgatggtgcagttagcccatctcctcaaaaatgtttgtggtgaagtttccttgaaaaagcttgggcttaaagcatgtcacttagatgacagatttagaaagaatttcggtcattacagtgagaagtcctctttggctcagtcaggctaacccgctccaagggtaggagaggataattcaccaggcggtgcatctaatggacatcgtctctggatgagggaggtagagagagcctgtggttcttttaaatgcattgatttctctac

SEQ ID NO: 4769 - DNA, 239 bp, Homo sapiens
  misc_feature 1..239: note = U/M: U (0.06:0.92) in Osteoblasts
  misc_feature 1..239: note = source = chr7:6952692-6952930; Gene: CCZ1B (Intergenic)
  source 1..239: mol_type = genomic DNA
cgctgggtgcggtggctcaagcttgtagttccagcactttgggaggccgaggcgggtggatcccctgaggttgggagtttgagaccagcctgaccaacatggagaaaccccatctctactaaaaatacaaaattaccggggcgtggtggtgcttgcctttaatcccagctgaagcagaagacttgcttgtacccaggaggcggatgttgcggtgagccgagatgatgccattggactcc

SEQ ID NO: 4770 - DNA, 478 bp, Homo sapiens
  misc_feature 1..478: note = U/M: U (0.02:0.88) in Osteoblasts
  misc_feature 1..478: note = source = chr2:39646607-39647084; Gene: MAP4K3 (intron)
  source 1..478: mol_type = genomic DNA
cgcgatagaaacagctaaagaaactcaacacaaacaatacagacctactataaaaatagcagctccgcccagtaattaacagaaacctccaattttggtttttgaaagaaaaaaagtttgtcaaacctcatgtgaacacagtttactggaggaaataaaatctcaacattccaaataaaaacatcttctatgattagcagatcctagtagtattggtgaattaacatcacagcactaaccagaaataagagaccccagaagaaaaatatcaacacaatgattatgaaataaaaatgactaacttcttcaagctgaatggcattcaaaaactaaacataactgtgtgtggactgtttctgcaaaaggctttatattctctgctcaatgctttttgaagatttggagtttgtggttttactgacgggatagaagatggtggagcacaggatggggacaggcaaaagcaaggtatggaaac

SEQ ID NO: 4771 - DNA, 265 bp, Homo sapiens
  misc_feature 1..265: note = U/M: U (0.07:0.91) in Osteoblasts
  misc_feature 1..265: note = source = chr1:244532629-244532893; Gene: C1orf100 (intron)
  source 1..265: mol_type = genomic DNA
cgaagatacagaatttgtgtgtgatttaaatagacttttaaaactttgatcgaaacagtctctgaagatccagaggcaactgtgtggtcagcccatcctgcgtgggatgatattggagcagcgtcatttctctggggtacaacccgtggttcattgccacacgccaaagaaatcaaggacgtgaacacacaaggagtgaggttaagagcggaggtttaataggctaaagaaagagaaaatctctctcttacagagagagggagtc

SEQ ID NO: 4772 - DNA, 267 bp, Homo sapiens
  misc_feature 1..267: note = U/M: U (0.08:0.92) in Osteoblasts
  misc_feature 1..267: note = source = chr19:57454683-57454949; Gene: MIMT1 (Intergenic)
  source 1..267: mol_type = genomic DNA
cgctgtggctcatgcctgtaatcccagcactttgggaggccaagatgggtggatcctgagttcaggagatcaggatcatcctggccaacatggtacaaccccatctctactaaaaatacaaaaattagccggtgtggcagcgcacgcttgtaatcccagctactcgggaggctgaggcaggagaatcgcttgaacccaggaggcagaggttgcagtgagtcaagatcacgcaactgcactccagcctaggtgacagagcgagactcc

SEQ ID NO: 4773 - DNA, 129 bp, Homo sapiens
  misc_feature 1..129: note = U/M: U (0.08:0.91) in Osteoblasts
  misc_feature 1..129: note = source = chr13:76765181-76765309; Gene: C13orf45 (Intergenic)
  source 1..129: mol_type = genomic DNA
cgcactgcctttatgagctgtaacactcactgtgaaggtctgtagcttcactcctgaggccagcaagaccacaaacccaccgggaggaatgagcacttctggactggaggaacgaacaactccagacgc

SEQ ID NO: 4774 - DNA, 338 bp, Homo sapiens
  misc_feature 1..338: note = U/M: U (0.09:0.92) in Osteoblasts
  misc_feature 1..338: note = source = chr1:118130149-118130486; Gene: FAM46C (Intergenic)
  source 1..338: mol_type = genomic DNA
cgctgaagaatttctgggcaaattttggtccgtgtggtcgctctgggcaattgtcacagaaagccttggagaagccgcctgtgcagcccagcagcacccggcccccacccagctcgtggcagtgtgtgctctgttctgtttggtgctttcagggtgcaaggacaagaggtgcactcaggcacttttgggggctgccagcaggatgtggggagcaggagcaaagcttagccacctcagccgccttggtcctccccattcaacccacagcggtactcctcaagagcacgtagctggggcgatcatttctttctggctctgagttctgtgtcaggccactc

SEQ ID NO: 4775 - DNA, 169 bp, Homo sapiens
  misc_feature 1..169: note = U/M: U (0.11:0.93) in Osteoblasts
  misc_feature 1..169: note = source = chr17:20678753-20678921; Gene: LOC100287072 (Intergenic)
  source 1..169: mol_type = genomic DNA
cgttcaaggcccggccctccagttccgccgcggccaccgctgccgaggtgcgtgggcccggcggagtgccaggcctgcattctctcctccttcctccccgcctctggctgccagtaggacctttctctcgcagccgctgggaccccgtgtcatcgccaaggccgagcac

SEQ ID NO: 4776 - DNA, 93 bp, Homo sapiens
  misc_feature 1..93: note = U/M: U (0.12:0.91) in Osteoblasts
  misc_feature 1..93: note = source = chr4:7107002-7107094; Gene: FLJ36777 (Intergenic)
  source 1..93: mol_type = genomic DNA
cggcctcccaaagtgttgggattacaggcatgagccaccgcgcccggccaccctcctatactcttgattcccgacacactggggttagtgacc

SEQ ID NO: 4777 - DNA, 220 bp, Homo sapiens
  misc_feature 1..220: note = U/M: U (0.1:0.89) in Osteoblasts
  misc_feature 1..220: note = source = chr12:19589066-19589285; Gene: AEBP2 (Intergenic)
  source 1..220: mol_type = genomic DNA
cgatgtaagtgacctctggtcatcgtagctactcattatgtgctaattataatacattagcatgctaagagacaactcccaccagtgccttgacagtttacaaatgccatgccaatgtcgggaagttaccctatcgtctaaaaaatggagaaaccctcatttccaggaactgcccacccttttcctggaaaactcatgaataatctaccccttgtttagc

SEQ ID NO: 4778 - DNA, 49 bp, Homo sapiens
  misc_feature 1..49: note = U/M: U (0.12:0.89) in Osteoblasts
  misc_feature 1..49: note = source = chr16:86264260-86264308; Gene: LOC146513 (Intergenic)
  source 1..49: mol_type = genomic DNA
cgttgacacgaaggacacacgcagcctcgtgttactcaattctaatttc

SEQ ID NO: 4779 - DNA, 70 bp, Homo sapiens
  misc_feature 1..70: note = U/M: U (0.26:0.97) in Osteoblasts
  misc_feature 1..70: note = source = chr11:1520812-1520881; Gene: MOB2 (intron)
  source 1..70: mol_type = genomic DNA
cgggatgaccacaggacggccaggccacgtgcccacgggatgaccacagatgagcttgccacatgcctgc

SEQ ID NO: 4780 - DNA, 325 bp, Homo sapiens
  misc_feature 1..325: note = U/M: U (0.24:0.95) in Osteoblasts
  misc_feature 1..325: note = source = chr5:1501806-1502130; Gene: LPCAT1 (intron)
  source 1..325: mol_type = genomic DNA
cgcgccccacagagtggagagctggggaggggctgcagctggcacacagctgaccaaggctgaccagcactgaccgaggctgaccaaggctgaccgaggctgaccagtgctgaccggcgctgaccaaggctaaccaacactgaccagcactgaccaaggctgaccggcactgaccaaggctgaccaacattgaccggcactgaccaaggctgaccggtgctgaccaaggctgaccaacactgaccgacactgaccaaggctgaccggcactgaccaaggctgaccaacactgactggcactgaccaaggctgaccaacattgacc

SEQ ID NO: 4781 - DNA, 486 bp, Homo sapiens
  misc_feature 1..486: note = U/M: U (0.23:0.92) in Osteoblasts
  misc_feature 1..486: note = source = chr2:3488750-3489235; Gene: ADI1 (Intergenic)
  source 1..486: mol_type = genomic DNA
cgttatgaaacacttctaaaagaatgtaaaagatctcattaataattttgagtacctgttaaaatgatagtaattttggatctagtagattaaataaaacatattattaaaattaagatgacctttgaacatttttaacgtggctactagaaaactttaagttacgtatgtggcgcccatttgtggctcccattctgtttctgttggatggtgccaaagaaaccaacacgtaaaagcccctgcagaggagccgctgctttgccaatggttagtggtcagtgtgggttctgccctctgggttcctggcaaccagggctgctctctgagggctgaggttgccacgggctaggcagatactggccctgcagccctcactctccggagggcgtggggcatgggatgggatgtttcagaggacgtggggcatgatgggacgggaagtttcagtgggtgtggggcatgatgggacggggtgttccggagggc

SEQ ID NO: 4782 - DNA, 478 bp, Homo sapiens
  misc_feature 1..478: note = U/M: U (0.29:0.95) in Osteoblasts
  misc_feature 1..478: note = source = chr7:105159466-105159943; Gene: PUS7 (intron)
  source 1..478: mol_type = genomic DNA
cggtctcccaaagggctgggattacaggcctgagccaccgcgcccagcctacaaaaacagccattagtcttaattctatcatattatatttcaaaactatccacaactttcactttgtaaatacatctttcctccatcccctgcaaattatcagtaatctctatagctctcacaatagtgagcattttctttagggccagagcacagagaacacactaatttttttttttttggagatggagttttcctctgttgcccaggctggagtgcagtggtgcagtctcggctcaccgcaatctccacttccagcgttccggcgattctcctacctcagcctcccgagtagctgggattacaggcatgggctaaaattaccacatccagctaatttttgtatttttagtagagagggggtttcgccatgttggccaggatggtctcaaactactgacctgacctcaaacgagctgcctgcctc

SEQ ID NO: 4783 - DNA, 275 bp, Homo sapiens
  misc_feature 1..275: note = U/M: U (0.35:0.96) in Osteoblasts
  misc_feature 1..275: note = source = chr5:154334374-154334648; Gene: MRPL22 (intron)
  source 1..275: mol_type = genomic DNA
cggagtctcgctctgtcgcccaggctggagtgcagtggcgcaatctcagctcactacaagctccacctcccgggttcatggcattctcccgcctcagcctcccgggtagctgggaccacaggcgccggccaccatgcccggctaattttttttttttgtatttttagtagagacggggtttcaccattcacaggatggtctcgatctcctgaccttgtgatccggccgcctcggcctcccaaagtgctgggattacaggctgagccactgctccc

SEQ ID NO: 4784 - DNA, 12 bp, Homo sapiens
  misc_feature 1..12: note = U/M: U (0.04:0.96) in Osteoblasts
  misc_feature 1..12: note = source = chr10:100288820-100288831; Gene: HPSE2 (intron)
  source 1..12: mol_type = genomic DNA
cgcgcacgcgcg

SEQ ID NO: 4785 - DNA, 31 bp, Homo sapiens
  misc_feature 1..31: note = U/M: U (0.03:0.91) in Osteoblasts
  misc_feature 1..31: note = source = chr15:89238600-89238630; Gene: ISG20 (Intergenic)
  source 1..31: mol_type = genomic DNA
cgcccttcctctaacaccatgcgcgcgcacg

SEQ ID NO: 4786 - DNA, 155 bp, Homo sapiens
  misc_feature 1..155: note = U/M: U (0.03:0.91) in Osteoblasts
  misc_feature 1..155: note = source = chr8:117168001-117168155; Gene: LINC00536 (intron)
  source 1..155: mol_type = genomic DNA
cggtagtcatcacacagtattgctattgtccaggggttggagtctgaggctgaggctgaatcggaaagttggttttagtatcccagcaaggccagggaaaataaattcccgagcgagaatatggctcgacgtcaagcagctggagaaccggcccg

SEQ ID NO: 4787 - DNA, 243 bp, Homo sapiens
  misc_feature 1..243: note = U/M: U (0.04:0.91) in Osteoblasts
  misc_feature 1..243: note = source = chr4:184962449-184962691; Gene: STOX2 (Intergenic)
  source 1..243: mol_type = genomic DNA
cggagccataatggaatgtgtccacagactgaccacagtgttgctttacagaagacagacttcagagcaaaataaactccacaaagcgtgctgaatgggttcctatgacgcgcagccataaggaagtttctttttaaaacaaagttaacttttttcctgtttataagaataatgcacaaccatcgggaaaaaaaactaggaaaatataacggaaaaattttaaaaccacccatagtgttaacg

SEQ ID NO: 4788 - DNA, 494 bp, Homo sapiens
  misc_feature 1..494: note = U/M: U (0.03:0.9) in Osteoblasts
  misc_feature 1..494: note = source = chr1:172215845-172216338; Gene: DNM3 (intron)
  source 1..494: mol_type = genomic DNA
cgggcaatccagtgtctcagaaaatgaggtgtgggtgaggagcatgatgaatatgtatggttacataactctgtgtcagttactcagagcatgaagggcttggattaatatatggagccatcacatttttcttggctttggtccctacccataaacccaggataatgtctccagtttccctgcttgcaaacattctggccacaatgcatcaaagaaaaaaatgagactttgttaggaaaaatattgatcaacattattatctcttgagcaacaagcaaattataataattgaatactccatggtatctcatgagttttcagtattctgcaaaaacatttatcgtccctgggtgaggaatctttttaacttggacatatctatgcactactgtcctgtctttggactgagttcttggtggcatagtcattctgttactcctctgttggctggcacagtggtacttcgcgtgtggtctacgcacgtttttggtgcg

SEQ ID NO: 4789 - DNA, 480 bp, Homo sapiens
  misc_feature 1..480: note = U/M: U (0.06:0.92) in Osteoblasts
  misc_feature 1..480: note = source = chr7:730057-730536; Gene: PRKAR1B (intron)
  source 1..480: mol_type = genomic DNA
cgtaacaaacctgcacacgtacccccaaacctaaaataaaagttggaaaaaaagaaattaaataagaagccattaacaacaacaacaacaaatttcaagtgctgagctattgggatcagggtggaatttcttcagcttcgtgcatgttgctgtaatgttaacacaacacaaacaaattggaaggaactatgtcataataaaagtaaactactgtgtgccactgtgcagacataaataccactaaaaccacctaaataaataacaagtcccagaaggaatgcccccaccagctgcacacccagaagacggggctcctcaggaaggggctggtgcttctcagacgctcagaggcctgatgcctggggctgtaaaaaaaaacaaaaaaacacaacacccagcagtcctgtgtccagctgcacaaatgggtgccagctccaaggctgaccggtctccactgcatcctcctcagcgggcctggcg

SEQ ID NO: 4790 - DNA, 427 bp, Homo sapiens
  misc_feature 1..427: note = U/M: U (0.02:0.87) in Osteoblasts
  misc_feature 1..427: note = source = chr10:3856157-3856583; Gene: KLF6 (Intergenic)
  source 1..427: mol_type = genomic DNA
cgtttttaaggctttctgtatattttctcaaatttgctttaaaagtgacatcagtttgcattcacatcaactgcattttggagtagacacagggcgttgattttacaaatctgccggcatttgaggagtaagcgtttgttctaaggcttaagccactacaagaacgcacaccacaatgatcaagccacacaaagtcctctggtgactcatgaggttggagagaaattgctgctgttgaaattaaaatatgttcctctcaaatctgttattatttctgatttatatgtgagggaaaccaacacttagagaagttaggaaatcttccccaaatcacacagctggtaaagtccaaaaatcagaattcaagctcaagggagctgactcccagggccagcggcctggtttccacagcccgttgtctctgtcg

SEQ ID NO: 4791 - DNA, 59 bp, Homo sapiens
  misc_feature 1..59: note = U/M: U (0.04:0.88) in Osteoblasts
  misc_feature 1..59: note = source = chr17:77713422-77713480; Gene: ENPP7 (intron)
  source 1..59: mol_type = genomic DNA
cgggggggccgagacttgtttcggccgtgatcagcctcaatgccggcgacgcggccacg

SEQ ID NO: 4792 - DNA, 322 bp, Homo sapiens
  misc_feature 1..322: note = U/M: U (0.01:0.85) in Osteoblasts
  misc_feature 1..322: note = source = chr10:100288470-100288791; Gene: HPSE2 (intron)
  source 1..322: mol_type = genomic DNA
cggaagggcagcctttccgagggaagtgctgtgcattcattagaacatggggagccaagtgattgggaagcagcagccccaaatgggctttacggttactgtgaatgaaaaagaaaggccatgtatttttaagagaaaaagccatataaatctgacagctccaccccactcatagcaaacctcagtcatctccagccaaaccactctattttcctgacagagacttgcacagtgggaagacactgtgaaaaatcagtggtaacaaccgcaaaccacttatggtacgccctgggcttaatcatgatgtttttgggttcattcg

SEQ ID NO: 4793 - DNA, 55 bp, Homo sapiens
  misc_feature 1..55: note = U/M: U (0.03:0.86) in Osteoblasts
  misc_feature 1..55: note = source = chr17:40997798-40997852; Gene: AOC2 (exon)
  source 1..55: mol_type = genomic DNA
cggccgtaacagccgaggcttggtgcggggagtggactgcccctatcaagccacg

SEQ ID NO: 4794 - DNA, 79 bp, Homo sapiens
  misc_feature 1..79: note = U/M: U (0.03:0.86) in Osteoblasts
  misc_feature 1..79: note = source = chr9:138428373-138428451; Gene: OBP2A (Intergenic)
  source 1..79: mol_type = genomic DNA
cgtgcccatgagtatcccattttccatcgacgagatgccctccctgcatctgtgcacacccaagaaatctgcacacgcg

SEQ ID NO: 4795 - DNA, 159 bp, Homo sapiens
  misc_feature 1..159: note = U/M: U (0.05:0.88) in Osteoblasts
  misc_feature 1..159: note = source = chr1:10881052-10881210; Gene: CASZ1 (Intergenic)
  source 1..159: mol_type = genomic DNA
cgggactacaggtgcctgtcaccacacgcagctaatttttgtatttttagtagagacggggtttcgccacattggccagagtggtctcaaactcctgacctcagatgatccgcccaccttggcctcctaaagtgctgggattacagccatgagccaccg

SEQ ID NO: 4796 - DNA, 159 bp, Homo sapiens
  misc_feature 1..159: note = U/M: U (0.05:0.88) in Osteoblasts
  misc_feature 1..159: note = source = chr4:16695064-16695222; Gene: LDB2 (intron)
  source 1..159: mol_type = genomic DNA
cgcctcctgggttcaaacgattcttctgcctcagcctcccgagtagctgggaccacaggcgtgtgccaccacatccggccaatttttgtagtttttagtagagacgggtttcaccatgttgggccaggctggtcttgaactcctgacctcgtgatcccg

SEQ ID NO: 4797 - DNA, 51 bp, Homo sapiens
  misc_feature 1..51: note = U/M: U (0.11:0.93) in Osteoblasts
  misc_feature 1..51: note = source = chr12:132431728-132431778; Gene: EP400 (Intergenic)
  source 1..51: mol_type = genomic DNA
cggtgctctgtcgcccaggctggagcgcagtgttgcgatctcagctcaccg

SEQ ID NO: 4798 - DNA, 75 bp, Homo sapiens
  misc_feature 1..75: note = U/M: U (0.05:0.87) in Osteoblasts
  misc_feature 1..75: note = source = chr2:237228919-237228993; Gene: ASB18 (Intergenic)
  source 1..75: mol_type = genomic DNA
cgtttcgcatcatcgcgtgcttctcttcaattaaagtcttaagactttcaaggacaggacaagccacttatgccg

SEQ ID NO: 4799 - DNA, 99 bp, Homo sapiens
  misc_feature 1..99: note = U/M: U (0.07:0.89) in Osteoblasts
  misc_feature 1..99: note = source = chr7:71790979-71791077; Gene: CALN1 (intron)
  source 1..99: mol_type = genomic DNA
cgggttcaagcgattctcctgcctcaagccttctgagtggccaggattaccggtgcccgccaccacgcctggctaaattttgtatttttagtagagacg

SEQ ID NO: 4800 - DNA, 155 bp, Homo sapiens
  misc_feature 1..155: note = U/M: U (0.09:0.91) in Osteoblasts
  misc_feature 1..155: note = source = chr9:124206177-124206331; Gene: GGTA1P (Intergenic)
  source 1..155: mol_type = genomic DNA
cgctgaggtttacactagctaagcagtgggaccagctgatgaccgactgtcctctgatgaagcccacatcagtcacctaccacttaccacttgagccgagttcgaggttgcggccacatgagccataattacaccaccacactccggcgtgggcg

SEQ ID NO: 4801 - DNA, 155 bp, Homo sapiens
  misc_feature 1..155: note = U/M: U (0.06:0.88) in Osteoblasts
  misc_feature 1..155: note = source = chr17:12949850-12950004; Gene: ELAC2 (Intergenic)
  source 1..155: mol_type = genomic DNA
cgacagccccgcatgattcatacgcatgtagtgagttgagagccgccgcgtctacaactcatgctttcgctcagccctgcctgttgtaggtagtgagtttgtggtttaaatctaagaagaggggaggagaagcgcacaggcgggacatacctgcg

SEQ ID NO: 4802 - DNA, 243 bp, Homo sapiens
  misc_feature 1..243: note = U/M: U (0.08:0.9) in Osteoblasts
  misc_feature 1..243: note = source = chr17:16833421-16833663; Gene: TNFRSF13B (Intergenic)
  source 1..243: mol_type = genomic DNA
cgagttttggtcaggtcctggcccttagctggggacttggtacaaacaggcagtgacctctgagccaagactgtggttcttgatttgggttttggtcaaatgctcatgggaacagagtccgtcaggaaaggccgcccctcccagggacagccctggcccacttaccaccgcccgggcccgcaggccaccccctctgtctcaccaaccactcctgattccctgtccctggaccagtctcccacg

SEQ ID NO: 4803 - DNA, 471 bp, Homo sapiens
  misc_feature 1..471: note = U/M: U (0.06:0.88) in Osteoblasts
  misc_feature 1..471: note = source = chr3:182999060-182999530; Gene: MCF2L2 (intron)
  source 1..471: mol_type = genomic DNA
cgcagccccagagtaaaaaatactagccacaggaatgagtggctctgtcttcctctccagaactgacgggcaaaagagggggaacctcaccttttttttttttttttttttggaaactcactgggttttgatatggagaacaggaagagaatctaccctagcagcacattcacagatggtttgtctgccctatttgctccatctccctggctcttcctagcacttcttttcctactttccattttcattggccgcaaaagccacttaaatattcctttggaaaactgggcagtctgtcccctttttaaaaccacaactatttccaggagagttaaagggctttcggactgcccatcattcatgcattgtggtgaactagctcagactgcctctacctttagtccagatcagctgccttgggagggcgattcctggaggaaaggatgaggagaggaaggttttaggacatcg

SEQ ID NO: 4804 - DNA, 54 bp, Homo sapiens
  misc_feature 1..54: note = U/M: U (0.07:0.88) in Osteoblasts
  misc_feature 1..54: note = source = chr17:77713718-77713771; Gene: ENPP7 (intron)
  source 1..54: mol_type = genomic DNA
cggtggcttccgcctggaaccccagtacttccagaggccgacgcaggaggatcg

SEQ ID NO: 4805 - DNA, 193 bp, Homo sapiens
  misc_feature 1..193: note = U/M: U (0.09:0.9) in Osteoblasts
  misc_feature 1..193: note = source = chr12:111522484-111522676; Gene: CUX2 (intron)
  source 1..193: mol_type = genomic DNA
cgatgaattatttgcaggttcacaggaaacttctattttaaaagcaaaatggtatgagagtggctgtgaaagctttgcggcagcgacggcgctgtataatgaggggccacgtggcgggcgggctggtagacagcccgctgtacctgctctcactcgggctccggggtgcccaccttctggagaggctgctgcg

SEQ ID NO: 4806 - DNA, 200 bp, Homo sapiens
  misc_feature 1..200: note = U/M: U (0.06:0.87) in Osteoblasts
  misc_feature 1..200: note = source = chr6:169110971-169111170; Gene: SMOC2 (Intergenic)
  source 1..200: mol_type = genomic DNA
cggcaaccgcgtgacaacctcaagccagtcacctttccaggcccaacaactgtcctgtgaatacagggtgctcacgggaacggctccatcagccccgcacgccagtcagtgccatctccaaatggtcatttggtctcaagtttagcttctgtcttaatgtctatggttttggctgaagtcatatggtgttattgaagccg

SEQ ID NO: 4807 - DNA, 210 bp, Homo sapiens
  misc_feature 1..210: note = U/M: U (0.07:0.88) in Osteoblasts
  misc_feature 1..210: note = source = chr18:46486493-46486702; Gene: SMAD7 (Intergenic)
  source 1..210: mol_type = genomic DNA
cgtgcctaggaaatgaatttttagaggagataattgtccaagtgatagggtaatgaagaaggaagctactttttctagtggctgggattttgtttgtgtgggggttttttgttttcagttttttgagacagagtctcgctctgtcacgcaggctggagtgctgtggcaggatcgtgactcaccgcaacctccgcctcccagattcaagcg

SEQ ID NO: 4808 - DNA, 221 bp, Homo sapiens
  misc_feature 1..221: note = U/M: U (0.09:0.9) in Osteoblasts
  misc_feature 1..221: note = source = chr6:107204712-107204932; Gene: LOC100422737 (intron)
  source 1..221: mol_type = genomic DNA
cgaattttactaaatgtgctttcatttgaaaccagagccttccttggttagccagaccactaggactgacatactgtaccgattacataatgtgagcaccatcaatatccttccattttaggagaattggctttttagccatcagtctagagcccgctataatttattttctttgtggtaagcggataacatgtctacattagttaaattactttaatacg

SEQ ID NO: 4809 - DNA, 234 bp, Homo sapiens
  misc_feature 1..234: note = U/M: U (0.08:0.89) in Osteoblasts
  misc_feature 1..234: note = source = chr5:159566311-159566544; Gene: PWWP2A (Intergenic)
  source 1..234: mol_type = genomic DNA
cgggagaccagggtctgcggtggagttaccactccacttcctcctctttcccacaggacagaggatttaggactgagcttaccatgtctgagttaaaatgtatgtatttatttattctgaaacaaggttttgctttgttgcctaggctaattttttaatttttttctgtagagatggggtcttacagccgggcacggtggctcacgcctatgatcccagcactttgggaggccg

SEQ ID NO: 4810 - DNA, 256 bp, Homo sapiens
  misc_feature 1..256: note = U/M: U (0.06:0.87) in Osteoblasts
  misc_feature 1..256: note = source = chr10:28490796-28491051; Gene: MPP7 (intron)
  source 1..256: mol_type = genomic DNA
cgtaaaagagtctaaaccttcctgctactatttcatattctttctctaaacaagggggtgaccacatggttgctacattagtatacagagccagctcaccaccattaagtgaaatcatctatgtatttttggtagaatctttaacaacttccacgcccgtcggtgaatggaacaaggctgttttgttttcagagagcaacaatttgatctctggtttacttggtggtgccccaaatatttttccatatgcttttcg

SEQ ID NO: 4811 - DNA, 301 bp, Homo sapiens
  misc_feature 1..301: note = U/M: U (0.09:0.9) in Osteoblasts
  misc_feature 1..301: note = source = chr4:186835453-186835753; Gene: SORBS2 (intron)
  source 1..301: mol_type = genomic DNA
cgtgtatacttgcactgactcttgcctcagtaaatctcagttaagtaatttgttacagtagcatttcctcattctggtataatttttatgtacagactgttttcattatttcaccctcataaaaatatacttttataatctagcctacagagttgctactcaatcatgtttcataacaagttctataggtacataccggaatgttattcaccattggcttagaatttaacagtttataaaggtgcaaatatctgggatttggggctgaaaggtactattatgttattaccgtgaacgcacg

SEQ ID NO: 4812 - DNA, 88 bp, Homo sapiens
  misc_feature 1..88: note = U/M: U (0.07:0.87) in Osteoblasts
  misc_feature 1..88: note = source = chr1:22729239-22729326; Gene: ZBTB40 (Intergenic)
  source 1..88: mol_type = genomic DNA
cgccagcctgggcgatgaaaccactaatgagcctgaggttctgcagagcccagcatctaattcaaaccaggcagatgacagccgcgcg

SEQ ID NO: 4813 - DNA, 125 bp, Homo sapiens
  misc_feature 1..125: note = U/M: U (0.02:0.82) in Osteoblasts
  misc_feature 1..125: note = source = chr2:235311835-235311959; Gene: ARL4C (Intergenic)
  source 1..125: mol_type = genomic DNA
cgtgtccttctgcacgagctccagagtgtgagaggccgactggagtcaagaaagtctgagttggctggaggccgcattccctgtggtcgacccagcttgctcactgcccagtgactggacccacg

SEQ ID NO: 4814 - DNA, 157 bp, Homo sapiens
  misc_feature 1..157: note = U/M: U (0.1:0.9) in Osteoblasts
  misc_feature 1..157: note = source = chr7:74254530-74254686; Gene: GTF2IRD2 (intron)
  source 1..157: mol_type = genomic DNA
cggtggtcaccgggaactttccatatggaaccaccacagcagcctgggttccagatcgcagacaacgtgaaacagactcacagccaacgcataacagacttttagtgcaaccaagaaataagtctttgctcctttaatcctccaaagtctggtgtcg

SEQ ID NO: 4815 - DNA, 174 bp, Homo sapiens
  misc_feature 1..174: note = U/M: U (0.13:0.93) in Osteoblasts
  misc_feature 1..174: note = source = chr9:125878907-125879080; Gene: MIR600HG (Intergenic)
  source 1..174: mol_type = genomic DNA
cgcacaggggatagcccagaagcctacaggaaaggtgagccgaacacatcacagagagagaagccactgctgccaagtgggcttggaagacagaacggacattggtgcctactagcgacgcaaaccacctgcacacagcatagcctcagacggggtgagcgccgccactcaccg

SEQ ID NO: 4816 - DNA, 199 bp, Homo sapiens
  misc_feature 1..199: note = U/M: U (0.1:0.9) in Osteoblasts
  misc_feature 1..199: note = source = chr17:71334790-71334988; Gene: SDK2 (exon)
  source 1..199: mol_type = genomic DNA
cggtagagggtgctctgctgacttggggggttaggggggttctggggcgttggagtccgactggccttgggccgaaagaggctgccctgctgggtgctggtgctgttggtgacggtggtgtggtctggctcacccgagtcgctctccgtgtagctgtaggcctgtgccctcgagatgcccttctgctgtcgccgccacg

SEQ ID NO: 4817 - DNA, 234 bp, Homo sapiens
  misc_feature 1..234: note = U/M: U (0.08:0.88) in Osteoblasts
  misc_feature 1..234: note = source = chr17:70318036-70318269; Gene: SOX9 (Intergenic)
  source 1..234: mol_type = genomic DNA
cggtcaaataatctctctaattgctgctctggaaaggagcattttaattccacagtgggacaatgtggagaagtggaatgctatgggaaatgtgggtacaaaatgggaggcgaagggcggatgaagcccagttatttatgtgattgcaggatgtttgcaaagacacactcaaaatgcacacaagttggcgtttccccacaagtgatggcagtgagcctgggaagggtaatgtcg

SEQ ID NO: 4818 - DNA, 329 bp, Homo sapiens
  misc_feature 1..329: note = U/M: U (0.09:0.89) in Osteoblasts
  misc_feature 1..329: note = source = chr4:27056084-27056412; Gene: STIM2 (Intergenic)
  source 1..329: mol_type = genomic DNA
cgttggcggtcacccggggatccagccaaagccagcaaatccttcggcagtgtcacatgttcatcctctcatgggttctttggttccacatttatgtccccttttggtagcaatttgttttatcatcatccatcaattacttttgtcccttggaacatagagtaagtttcttatgtggccaatgtctggaagattttcttctaaaatagggttgtgtatgatttgatgaatgctttgtaaatatttgaaattataggattgggttataaacaaatgactggttctaactccctggtgaatgtgcatatgcaaatcagctatgattcccg

SEQ ID NO: 4819 - DNA, 241 bp, Homo sapiens
  misc_feature 1..241: note = U/M: U (0.08:0.87) in Osteoblasts
  misc_feature 1..241: note = source = chr4:188104455-188104695; Gene: LOC339975 (Intergenic)
  source 1..241: mol_type = genomic DNA
cgtatttcaagatgttctccagagctgacccacatcccataggatttaggcctacaaagaattcagtgaagcgttaaaacaagtaatacactagcacagttggcgagctcaggagagctgcccggcagttcgggattgagggaaatgacaaggatttcttttttcagggtgggatgcggttgccctattctgctgctgaatgtgttccgaaaaaaagcccttctaggtggcggtttcttcg

SEQ ID NO: 4820 - DNA, 262 bp, Homo sapiens
  misc_feature 1..262: note = U/M: U (0.07:0.86) in Osteoblasts
  misc_feature 1..262: note = source = chr2:100214336-100214597; Gene: AFF3 (intron)
  source 1..262: mol_type = genomic DNA
cgcaccagctctccatcatgcactctggtccctgcttcatctaaatccttcaagtacccgctgccatggacctcgtaggcacctaataaatgagaagcttgttgagtcagcgagcaacttgaatcacatttctgttgatttttaagaacgatctagggcagcattttccaaaatgtgcttttagctcatctatcccatgaaggagggtttccagagtcagatcaatctgggaaatgccacaatggaaaacacagtacacccg

SEQ ID NO: 4821 - DNA, 408 bp, Homo sapiens
  misc_feature 1..408: note = U/M: U (0.07:0.86) in Osteoblasts
  misc_feature 1..408: note = source = chr2:237105887-237106294; Gene: ASB18 (intron)
  source 1..408: mol_type = genomic DNA
cgtcatatacaatcagtgtttaaattcacagatttctcttaaatgccattatattaacaaaataatttgtttgtttgaataatcattccagttagggccgatataatgagactggttgctgtgatgtatttttagatgtcttttttgtttcatgtgacttacttgtggtgggaactgggttatttgtcctgtagcatttctcactgtggggcttttgctgattacatccctgtgggatttgtggacatgctgctcttcctctgttttctgtaaattagtagttggatttagaagctggaccaaattcagttgccaggcgcagtggctcagcactttgggaggctgaggcaggcggatcacctgaggttgggagttcaagagcagcctgaccaacatggagaaacaccg

SEQ ID NO: 4822 - DNA, 416 bp, Homo sapiens
  misc_feature 1..416: note = U/M: U (0.06:0.85) in Osteoblasts
  misc_feature 1..416: note = source = chr12:18868524-18868939; Gene: PLCZ1 (intron)
  source 1..416: mol_type = genomic DNA
cggggtttcactgtgttagccaggatggggtttttaaattttgctttttgtttttgtgtctgtttttgtttttgtttttttgttgttgtttttaagatggggtctctgtcacccacactaaagtgcagcctcgaagtcctagacgcaagtcatcatcccacttcagcctcaaaactagctgggactacagtcacatgctaccacatttgggtaatctgctttggtttttgtttgtttgtttgtttaagtgcacagtgctttatttaggcatgtggcaatgcactataatgtaaaacttcagagttttcttaactaattgtctttgtattggagaaatggacctagaatattcatagagaaatcttgtctggcccgtggatactctctgggcaaataaggcagaagttctaaattcg

SEQ ID NO: 4823 - DNA, 137 bp, Homo sapiens
  misc_feature 1..137: note = U/M: U (0.08:0.86) in Osteoblasts
  misc_feature 1..137: note = source = chr5:141633552-141633688; Gene: SPRY4 (Intergenic)
  source 1..137: mol_type = genomic DNA
cgagcggcagccacgccgactccaggtttccacttgagggaggcctgccctgtgtttgaagcttcggctggtcttcccagcatttctctccactcactcgcgctcccacatctgggctgtgctcacagtggtatccg

SEQ ID NO: 4824 - DNA, 174 bp, Homo sapiens
  misc_feature 1..174: note = U/M: U (0.14:0.92) in Osteoblasts
  misc_feature 1..174: note = source = chr3:145899029-145899202; Gene: PLOD2 (Intergenic)
  source 1..174: mol_type = genomic DNA
cggaaacatagaatccatacacatttttttcaccatttcgtttaccactcagactttgggtttcttcccgtaagtttgtctgtgactcagttttagtttcagatgacttaatgcttccatctaatcaagggaagcgaacatgattatttaacatatccatgatccccagttacg

SEQ ID NO: 4825 - DNA, 342 bp, Homo sapiens
  misc_feature 1..342: note = U/M: U (0.12:0.9) in Osteoblasts
  misc_feature 1..342: note = source = chr2:47763919-47764260; Gene: KCNK12 (intron)
  source 1..342: mol_type = genomic DNA
cgctctggatgggatgctgccaaagagcggaagtacttctatgactgggcatcttaattcttagctggaagatgggaacgacatagcgaggccaagctgtgattggccaagaagcagcagttgctcatactaaccagatgagggatgtttggtctttttagtggtttggacgatgttcttgttttggtctgtgtttggacatgattatggggtgaatggtcttgtttttctctcactccatcttggtcataaggcggccttgcctgatcaggggttctgtgaaatgcttatgctccatggcagatcctcccagccccactgtgagtgccaggccagctctcg

SEQ ID NO: 4826 - DNA, 348 bp, Homo sapiens
  misc_feature 1..348: note = U/M: U (0.11:0.89) in Osteoblasts
  misc_feature 1..348: note = source = chr15:85826295-85826642; Gene: LOC642423 (Intergenic)
  source 1..348: mol_type = genomic DNA
cgctcttgttgcccaggttggagtgcaatggtgtgatctcagctcaccgcaacctctgcctcctgggttcaagcgattctcctgcctcagcctcttgtgtagctgggattacaggcatgtgccaccatgcccggctaatttgtatttttagtagagacagggtttctctatgttggtcaggctgatctcgaactcccgacctcaggtgatccgcccacctctgcctcccaaagtgttgggattacaggcatgagcagaaaacagtttgctggaacatcaagccaaaggaaaggtgtaatttattgtggggattgcgtattagataattagttttcaggagttccttcg

SEQ ID NO: 4827 - DNA, 487 bp, Homo sapiens
  misc_feature 1..487: note = U/M: U (0.09:0.87) in Osteoblasts
  misc_feature 1..487: note = source = chr3:175598604-175599090; Gene: MIR4789 (Intergenic)
  source 1..487: mol_type = genomic DNA
cgtgagccaacatacccggccactatttcttaagtgagttcttttttcttagaaaaattagaaaaatcccacaaaattctgtactagctgctagctcattgccctcaaagttgtaagcatttctggccctccacctagtaagcccaccacgctcttaagattcactgtgcctaatcggagtgtgagaggtagttgggaaaatgaatcatctataaattttatcactctacccaaattatagtctgcccattcctcggtgtacacttagctccctacaaggcaaccatttgtatttgtctacagccaaagattttttagtgagagctgactgctccagatttagtagactttgacagaaaggcttaatactgaagtggtctatccatagccctcttttttctccttttcctgtttctgctaataaaacaacttggagcagctagagaaaatatttctcttattttctgactgcccttgtaacatttcg

SEQ ID NO: 4828 - DNA, 136 bp, Homo sapiens
  misc_feature 1..136: note = U/M: U (0.09:0.86) in Osteoblasts
  misc_feature 1..136: note = source = chr5:175863425-175863560; Gene: FAF2 (Intergenic)
  source 1..136: mol_type = genomic DNA
cgcccagctaattttttgtatttttagtacagatggggtttcaccgtgttagccaggatggtctccatctcctgacctcgtgatttgcccacctcagcctcccagagtgctgggattacaggcttgagccacggcg

SEQ ID NO: 4829 - DNA, 267 bp, Homo sapiens
  misc_feature 1..267: note = U/M: U (0.09:0.86) in Osteoblasts
  misc_feature 1..267: note = source = chr15:65234718-65234984; Gene: ANKDD1A,ANKDD1A (exon,intron)
  source 1..267: mol_type = genomic DNA
cggctcctcatcaactccgacagtgacgtgaatgccgtggacaatgtaagtggctacagagaccttccgggccccagggagcttctggaaaccctcccaggctggcaggcttggctgtggtctcctagcatggcccagagttgaggaatcactttttttttttttttttagcttttagaaagtaatctaaatagttgctgaagggaatatcattttgttcatcattcccctcttttgacatttgggtgttcccaagttttggccacg

SEQ ID NO: 4830 - DNA, 300 bp, Homo sapiens
  misc_feature 1..300: note = U/M: U (0.11:0.88) in Osteoblasts
  misc_feature 1..300: note = source = chr11:46953537-46953836; Gene: C11orf49 (Intergenic)
  source 1..300: mol_type = genomic DNA
cgggaggtggaggttgcagtgagccgagatcacgccactgcagtccagcctgggtgaaagagcgagtctctgtctcaaaaaaacaaaacaaaacaaaacaaaacaaaacaaaacaaaactgcatagtctaggacagaagaaggcataactaatttttgtgggctaccaagaatcagtaaatcatcccccctttcaaactatatgaatgtgtaatttgcaactcttattgcagcatttgaaaacatagaataacaagaaagtacagtccataattacctttgaacttcagttcaatttacg

SEQ ID NO: 4831 - DNA, 316 bp, Homo sapiens
  misc_feature 1..316: note = U/M: U (0.14:0.91) in Osteoblasts
  misc_feature 1..316: note = source = chr2:225464554-225464869; Gene: CUL3 (Intergenic)
  source 1..316: mol_type = genomic DNA
cggtgggtatggggtcccacaaagtcagtcaatttccatgccatctgcaacttctctatttctgtctgttactatgatctttactcatgaccaccgtcttcgagaaaagatttcgttttgctaagtgttctctctatgttagagaaaggagctaaagtttcaacaagttttgaagcgaaaaaattttctcagttcaccagaaaatttatatttatctaaatgtcccagctatggttaagagaattttttttaagtaaccgcagtacaacttcttttattgcagtttattgttttttggatatgggtatactgtgcg

SEQ ID NO: 4832 - DNA, 141 bp, Homo sapiens
  misc_feature 1..141: note = U/M: U (0.15:0.91) in Osteoblasts
  misc_feature 1..141: note = source = chr2:121222350-121222490; Gene: LOC84931 (exon)
  source 1..141: mol_type = genomic DNA
cgtgccctggcttctgtcaaggcggctctgtggttgttcggggcctactctgtccggccacagctctgggcctttttccaccagccttctttgagctctcccttggctttgggagcagcatgagatttttccatgcttccg

SEQ ID NO: 4833 - DNA, 182 bp, Homo sapiens
  misc_feature 1..182: note = U/M: U (0.13:0.89) in Osteoblasts
  misc_feature 1..182: note = source = chr15:86557719-86557900; Gene: AGBL1 (Intergenic)
  source 1..182: mol_type = genomic DNA
cgggctgcctggaggaggagaacttgagaaggcacaggggtggagaggaattagagcagaagcaaagctaagctcaaagggcaggagcaggaatggagctgtggtcacagcccagaccgaacagcagacctgccaaggtgggtcgcagcaggacccgcttccaggatgcacgagggtaggcg

SEQ ID NO: 4834 - DNA, 353 bp, Homo sapiens
  misc_feature 1..353: note = U/M: U (0.17:0.93) in Osteoblasts
  misc_feature 1..353: note = source = chr17:59361606-59361958; Gene: BCAS3 (intron)
  source 1..353: mol_type = genomic DNA
cgcaaacctgctcaggttcccttctatgtcaggaaggtttgttctttcactcttcacaataaatcttgctgctgctcactctgggtccacactagctttatgagctgtaacactcaccaggaaggtctgtggcttcattcctgagaatgaagtcagcgagaccacgaaccgaccggaaggaagaaacactggacacatctgaacatctcaaggaacaaactccagacacaccatctttaagaactgtaacactcatcgcgagggtccgcggctggttcttgaaatcagccagacccaagaacccaccggaaggaaccaattccagacacaatctgaagacttgttcacctccg

SEQ ID NO: 4835 - DNA, 124 bp, Homo sapiens
  misc_feature 1..124: note = U/M: U (0.06:0.81) in Osteoblasts
  misc_feature 1..124: note = source = chr1:245242718-245242841; Gene: EFCAB2 (intron)
  source 1..124: mol_type = genomic DNA
cgtataattttggttccacaaacatctattaggcaagaaagatctgcggagttggcaccataatgttcacatccctgagggtttgtgaaagttgtgagggaacccggggaagcgatatgaggcg

SEQ ID NO: 4836 - DNA, 126 bp, Homo sapiens
  misc_feature 1..126: note = U/M: U (0.15:0.9) in Osteoblasts
  misc_feature 1..126: note = source = chr8:75009771-75009896; Gene: LY96 (Intergenic)
  source 1..126: mol_type = genomic DNA
cgtctctcctaaaaaatgcaaaaattagctgggtgtggtgatgtgtgactgtagtcccagctactcaggagggtgaggcaggagaatcgcttgaacccggcaggcggaggttgcagtgagctatcg

SEQ ID NO: 4837 - DNA, 180 bp, Homo sapiens
  misc_feature 1..180: note = U/M: U (0.12:0.87) in Osteoblasts
  misc_feature 1..180: note = source = chr2:175631591-175631770; Gene: CHRNA1 (Intergenic)
  source 1..180: mol_type = genomic DNA
cgtgagggaaagtgggcaaggaagaacctccccggggcatagccaggaacctcaaacagcaacggacaagggagttccacccacagagcagaatcgggtcgaatcgaggaatctgttgagaccttctctgtgcctaccctggctttctgcttactgccaatgcctgcaaccctgtaaccg

SEQ ID NO: 4838 - DNA, 252 bp, Homo sapiens
  misc_feature 1..252: note = U/M: U (0.15:0.9) in Osteoblasts
  misc_feature 1..252: note = source = chr14:101171821-101172072; Gene: DLK1 (Intergenic)
  source 1..252: mol_type = genomic DNA
cgagactgttttaaaacaaagccaaaccaaacaaaatggggaccaagagaggacctggcacatggcgggcacccagtccgagccggatccctccctccttcctgggaagtgaggacaacccactgctatgcccgctaatagagggttacgggcatcgactagtgcagaggctttattagcggtcaagtgctattaataaataaatccctaaatcattttataagctacaagtgcttgaagaaaaataaagcg

SEQ ID NO: 4839 - DNA, 252 bp, Homo sapiens
  misc_feature 1..252: note = U/M: U (0.12:0.87) in Osteoblasts
  misc_feature 1..252: note = source = chr15:77253399-77253650; Gene: RCN2 (Intergenic)
  source 1..252: mol_type = genomic DNA
cggacacgttggctcacgcctgtaatcccagcactttgggaggccaaggtgggcggatcgcctgaggtcaggagttcgagaccagcctgaccaacatggagaaaccacgtctctactaaaaatacaaaattatccgggtgtggtggtgcatgcctataatcccagctacttgggaaggctgaggcaggagaatagctttaacctgggaggtagaggttgcagtgagccgagatcccctgggaaacaagagcg

SEQ ID NO: 4840 - DNA, 447 bp, Homo sapiens
  misc_feature 1..447: note = U/M: U (0.09:0.84) in Osteoblasts
  misc_feature 1..447: note = source = chr12:2483309-2483755; Gene: CACNA1C (intron)
  source 1..447: mol_type = genomic DNA
cgtgcacgtttacttaccagtgctcattatttcttctcttccttttctgattcatctctctgccttcctctggtcctgtcattcttccctggtatgctggaattttttagtaatggactgttgattgcagtatgtgggaaatttggccataagttttggttctatgtggttttttattgtggtggcaattgtttttgccattttctgctttggtgttatttgtggctcccattggggcctccctaagccctgcttattttcccatgactggggactgggtgttattgttcgtaactcaatattccagccatggcattcaaggccaccaaccctctgcctgtctcaatagcatatcacagcccacgccacattggccttccgtgggccaggcctcagggtgggaactcagccagggtggttttcctactctgaggcattggtagagcg

SEQ ID NO: 4841 - DNA, 104 bp, Homo sapiens
  misc_feature 1..104: note = U/M: U (0.18:0.92) in Osteoblasts
  misc_feature 1..104: note = source = chr5:39615979-39616082; Gene: DAB2 (Intergenic)
  source 1..104: mol_type = genomic DNA
cgcgatctcggctcactgcaacctctgcctcctgggttcaagcaatgatctcctgcctcagcctctcgagtagctgggattacatgcgcctgccaccatccccg

SEQ ID NO: 4842 - DNA, 105 bp, Homo sapiens
  misc_feature 1..105: note = U/M: U (0.1:0.84) in Osteoblasts
  misc_feature 1..105: note = source = chr21:39324736-39324840; Gene: KCNJ6 (Intergenic)
  source 1..105: mol_type = genomic DNA
cgctgggccccacgtccataccaagttgtgctcctgtgcaccgcagaatggctcgtacgaggccgtggggaaccaggatggcaacaacaaaaaatgggttctccg

SEQ ID NO: 4843 - DNA, 231 bp, Homo sapiens
  misc_feature 1..231: note = U/M: U (0.16:0.89) in Osteoblasts
  misc_feature 1..231: note = source = chr6:157906764-157906994; Gene: ZDHHC14 (intron)
  source 1..231: mol_type = genomic DNA
cgggtgcagtggctcatgtctgtaatcccagcacttcgggaggccaaggcgggtggatcacttgaggtcaggaattcaacaccagcctggccaacatggtgaaactccgtctccactaaaaatacaaaaatattagctgggtgtggtagcacgtgcctgtaatcccagctactcgggaggctgaggctggagaattgcttgaacccaggaagtggaggttgcagtgagccg

SEQ ID NO: 4844 - DNA, 458 bp, Homo sapiens
  misc_feature 1..458: note = U/M: U (0.17:0.9) in Osteoblasts
  misc_feature 1..458: note = source = chr2:172753519-172753976; Gene: SLC25A12 (Intergenic)
  source 1..458: mol_type = genomic DNA
cgagatcatgccattgcactccagcctgagcaataagggcaaaactccgtctcaaaaaaaaaagaagaagaatcccttgaacccaaaaggcagaggttgcagtgagccaagaccacaccactgcactccagcctgagcgacagagcaagactctgtctcaaaaaaaaaaaacaaaaaaaacaaaaaaaaccaaaaaaacttgggttgcagctacaggaaacataagagaaatagcatcgttcccaaagtatagagaatattttaccgaggcaagtgctaccattcttttttttttcttttttttttttttgagacgtagtttcactcttgttgcctaggctggagtgcaacggcatgatcttggttcaccgcaacctccacctcctgggttcaagcaattctcctgcctcagcctcccaagtagctgggattacaggcatatgctgccacaatgcccg

SEQ ID NO: 4845 - DNA, 225 bp, Homo sapiens
  misc_feature 1..225: note = U/M: U (0.13:0.85) in Osteoblasts
  misc_feature 1..225: note = source = chr2:205337267-205337491; Gene: PARD3B (Intergenic)
  source 1..225: mol_type = genomic DNA
cgcacacacatacacacgacagtttggcaacgtctggagatgtttttggttgtcacgatttgggggatgttactggcatctagtgggtagaggtcaattatgctgctaaaaatctcgcagtgcagaagacaacccccccgcaactgcaacagatgattatacagccccaaatttccactgtgctgaggttaagaaactgacgtagggctgtctctcgaagaggcg

SEQ ID NO: 4846 - DNA, 423 bp, Homo sapiens
  misc_feature 1..423: note = U/M: U (0.13:0.85) in Osteoblasts
  misc_feature 1..423: note = source = chr5:153913670-153914092; Gene: HAND1 (Intergenic)
  source 1..423: mol_type = genomic DNA
cgaacttctgtgctcaagccatcttcctcctcagcctccagaatagctggtactacaggcgcaagccactgtccccagctgaaaatattttcagccaaaaagtcattggctacagtactgaggtcagagtggtgacagggagaccagttgggaagttatggtgtttacacaggcaagagggaatggtggcttggattgggctggtggtagtagcatggagagaaaattatggatttgagaaacactccacagataaaaatggtcaggatagggaatgggtcggtttgcgggcagtgggaggaagggaagaatcaaagatgattcccaggttactaatggggtgattttgaattcttactttccctcatctgtaaatgaggtaagatgataccacctatttcgagatgctgtgaggatgaagcg

SEQ ID NO: 4847 - DNA, 452 bp, Homo sapiens
  misc_feature 1..452: note = U/M: U (0.16:0.88) in Osteoblasts
  misc_feature 1..452: note = source = chr8:123106884-123107335; Gene: HAS2 (Intergenic)
  source 1..452: mol_type = genomic DNA
cgttgcatttaaaatgtaaactcttgcactgaacgaagtttgaaaagagttagaaattgtgaaatcgagttattaaatactaaagaattcaccagagaaaatattgcagccagagtatacatcctcagaggccatattcggaaaccacttggtctttttctaagacacagtcattatttttatagctgggaaagcctgagaaaatgtcctagttcaacatatcacctttttcatagaccgatgccaagctgaaataaattctatgaaaaaataaatattccaacgtgaactagaaaaatgcccttttcttgatccttgtgagttttttttcttagcattgatctttttcctttagttttgtgtactatggtgttagaaaaaataggcacagatgattgcatggttcattctcattaaatgccctcttttcttatgtcacagactctggggcg

SEQ ID NO: 4848 - DNA, 479 bp, Homo sapiens
  misc_feature 1..479: note = U/M: U (0.13:0.85) in Osteoblasts
  misc_feature 1..479: note = source = chr4:53536853-53537331; Gene: USP46 (Intergenic)
  source 1..479: mol_type = genomic DNA
cgaagcggcaccctgaatgagacttctctcagaggggcagcaccctataattctctttggtcctgtcctcctagaaagctgtaacccatgtggccaattgaaaacaaggtaagactgttctaaatgcccttgctgcacagtttttccccagtcaggactgagggtttcactcttccacttctcggaaaattaggtagacagccagattagggtttacactggcagggccacaggcatagcatcctcctagcggtggctgtggtactctataatcataaagcactaagaaagtgctggacatagcttactgtcaccagtggccaaaaagaggtaggctgtaaggaactgaccagcacaaaattctttactcaattgttaagcctttcaagatctacatgaattaggtaaatggattcaaaagtctcaagggtgctaatggattcaaatgatcacaaatgtcttgtgcttttttttaaacg

SEQ ID NO: 4849 - DNA, 344 bp, Homo sapiens
  misc_feature 1..344: note = U/M: U (0.16:0.86) in Osteoblasts
  misc_feature 1..344: note = source = chr10:74673021-74673364; Gene: OIT3,OIT3 (exon,intron)
  source 1..344: mol_type = genomic DNA
cgattcaggtttcctggctctaacagtggccctttttctctgcagtccctgtgttgtgcaaatcaaatgccattgaagtgaacatccccagggagctggttggtggcctggagctcttcctgaccaacacctcctgccgaggagtgtccaacggcacccatgtcaacatcctcttctctctcaagacatgtggtacagtggtcgatgtaggttcctcctggagggcacttggggaatgaccaaaagccggttatttgggaggcagtggacagaggtatgccatgtggcttgtgtcatcgatgagatatttacacacaaaagaactgagctcaaaacatcttacg

SEQ ID NO: 4850 - DNA, 419 bp, Homo sapiens
  misc_feature 1..419: note = U/M: U (0.2:0.9) in Osteoblasts
  misc_feature 1..419: note = source = chr6:117937031-117937449; Gene: GOPC (Intergenic)
  source 1..419: mol_type = genomic DNA
cggtggcaatccatatggggatgtattcttctccaggggcggtctccagtcctctctcctgagggagtgtgctcttctgcctcactgcggtggcctcagggatgagaaattgagacccacccagtgtgacgaataaactcggactctcagcaacgcagagaaaagaaaagaaagaaactggccagcaaggtagccacataccgtggtgacaactccatgcacagaccaaggaaggagaagccgcaggggccagtaaagtatttccttggtggtcgggactaaggaaaaagccacaggactgtaaagcattccttggttaggacataccaaggagagagaaaccacaggggcggtaagcattccttagttgggactagggaaagaaagccgcagcagggccgtgaagtattccttagtcg

SEQ ID NO: 4851 - DNA, 136 bp, Homo sapiens
  misc_feature 1..136: note = U/M: U (0.2:0.89) in Osteoblasts
  misc_feature 1..136: note = source = chr22:45070295-45070430; Gene: PRR5 (intron)
  source 1..136: mol_type = genomic DNA
cgcctgaggtcaagagttcaagaccaggccgggtacggtggctcacgcctgtaatcccagcactttgggaggctgaggcgggcggatcacgaggtcaggagatcgagaccatcctggctaacacggtgaaaccccg

SEQ ID NO: 4852 - DNA, 229 bp, Homo sapiens
  misc_feature 1..229: note = U/M: U (0.19:0.88) in Osteoblasts
  misc_feature 1..229: note = source = chr16:87062046-87062274; Gene: C16orf95 (Intergenic)
  source 1..229: mol_type = genomic DNA
cgtccaggttgtggtcaccctttaagtggcaagtagagaatcccacagaaaaccaagagccgaagtccactgcctaaagcagagcctccctagggaagggtgggtttccacatcctttggcagagagaagacatcagagcaaaacccaatgccccggctgggattgaagggcctgcagaacagaatcacaaggagaggggctggatgccgaatgacagctccgccctcg

SEQ ID NO: 4853 - DNA, 276 bp, Homo sapiens
  misc_feature 1..276: note = U/M: U (0.25:0.94) in Osteoblasts
  misc_feature 1..276: note = source = chr7:139653454-139653729; Gene: TBXAS1 (intron)
  source 1..276: mol_type = genomic DNA
cgtgcgtcctgtcgaacctgtggatggatccaccctctgacctccacagacccaggaatgggcaggacaggcctgcgcctaaggacagggatggggggaaagttcaagcattttcacttcaagaaaaattgtggtgcacctcagcccagaagctataatttagtggtggacaccaaatttaaataactgattatctggcttttcgtcattttgtaactaaaaggtttttgctttaaaaaaacatctttagtctaagtttgtccgacccacagcccg

SEQ ID NO: 4854 - DNA, 237 bp, Homo sapiens
  misc_feature 1..237: note = U/M: U (0.21:0.89) in Osteoblasts
  misc_feature 1..237: note = source = chr11:46326464-46326700; Gene: CREB3L1 (intron)
  source 1..237: mol_type = genomic DNA
cggaggccggtggccaggccctgtaatttgggaagattgtgggtattcctggagcccatgggcagcctgtggcccagagctggggcactcaggctcccaacagggtgcggcctggcctccaaggtggtcaatcagccactactgcctctccccgaccacagcaggccccaaagtccagagtcccctccagccctgccttgaatgttggctcccctcccctctcccctgtcttacccg

SEQ ID NO: 4855 - DNA, 401 bp, Homo sapiens
  misc_feature 1..401: note = U/M: U (0.24:0.92) in Osteoblasts
  misc_feature 1..401: note = source = chr2:27173679-27174079; Gene: DPYSL5 (TTS)
  source 1..401: mol_type = genomic DNA
cggctgtctagaaccccgcttttggagttggccctctgtagtctcaaccccatccattgcattgagacccctctaccttccctctagagctcagtcagatgttaggaggattatctgattaaactctttcacactaaagggtaaaactgtggcttctaaggccgggtgctgtggctcatgcctgtgatcccagcactttgggaggccgaagcgggtggatcacctaaggtcaggagtttcagaccagcctgaccaacatggagaaaccccgtctctactaaaaaaaatacaaaattagccaggtgtggtggtgcatgcctgtaatcccaggtactcaggaggctgaggcaggagaatcgcttgaacccgggaggcggaggttgcagtgagccaagatcgcg

SEQ ID NO: 4856 - DNA, 82 bp, Homo sapiens
  misc_feature 1..82: note = U/M: U (0.28:0.95) in Osteoblasts
  misc_feature 1..82: note = source = chr4:42123330-42123411; Gene: BEND4 (intron)
  source 1..82: mol_type = genomic DNA
cgatgcggctaggaaaccggcacggagttctgcgcgtggagactcatcacggcagcattcatactctcctcaacaagcaacg

SEQ ID NO: 4857 - DNA, 115 bp, Homo sapiens
  misc_feature 1..115: note = U/M: U (0.22:0.89) in Osteoblasts
  misc_feature 1..115: note = source = chr19:3806500-3806614; Gene: ZFR2 (intron)
  source 1..115: mol_type = genomic DNA
cgcccgcctcggcttcccaaagtgctgggatgacaggcgtgagccacccggcccggccgacaccgcttcttacgactgcggagcttgggtcactgcagggcctgaggaattttcg

SEQ ID NO: 4858 - DNA, 211 bp, Homo sapiens
  misc_feature 1..211: note = U/M: U (0.19:0.86) in Osteoblasts
  misc_feature 1..211: note = source = chr7:1856511-1856721; Gene: MAD1L1 (intron)
  source 1..211: mol_type = genomic DNA
cgagagccagccccaccccggtcagcacccacacagccccaggtcaggcaggacacaaacccggcccaccacaaagctccctctgaaaccacgtccctgaaaagtcctgtacccagaatatgcccagaactcccacaactccaccatgaagaggaaagagccaattaaacaaggggcccttgaacatttctccagagaagagccacacacg

SEQ ID NO: 4859 - DNA, 350 bp, Homo sapiens
  misc_feature 1..350: note = U/M: U (0.23:0.9) in Osteoblasts
  misc_feature 1..350: note = source = chr7:6633827-6634176; Gene: C7orf26 (intron)
  source 1..350: mol_type = genomic DNA
cgagtttcaccatgctggccaggctggtctcgaactcctgacctcaggtgatcacccgcctcggcctctcaaagtgttgggattacagatatgagccaccacactcggccccattaacatcttttttttgtcttggaagtggttctgccatttctggaggtggtcactgtgtgtgcatagttgctggtctactcactcacgacatctgtagttaagtggactgtgtggcttctttccagcggacgcccgtggtttactgtgtgaggttagccaaggcccttgtagatgactactgctgtttggtgccgggatccattcagacgctgaagcagatattcagtgccagcccg

SEQ ID NO: 4860 - DNA, 189 bp, Homo sapiens
  misc_feature 1..189: note = U/M: U (0.22:0.88) in Osteoblasts
  misc_feature 1..189: note = source = chr8:117595358-117595546; Gene: EIF3H (Intergenic)
  source 1..189: mol_type = genomic DNA
cgagactccgtctcaaaaaaaaagaaaagaaatccacatacacccctggctggccgggcagtgaggacccaccacccaagccagtaccctcctgagaagaggagggaaagtgacatctggatcacacctggagaccacaggaacatcgtgttccagcctccaagtcgccgcctgcctcaacccagcacg

SEQ ID NO: 4861 - DNA, 282 bp, Homo sapiens
  misc_feature 1..282: note = U/M: U (0.24:0.9) in Osteoblasts
  misc_feature 1..282: note = source = chr18:14090045-14090326; Gene: ZNF519 (intron)
  source 1..282: mol_type = genomic DNA
cggtccacgactcaccttccatagcctccaggggtagacaccggtgtgtccaccgctcactggctcatgggttggtcccttatttttattgagacctgttcaatctgttagaaactgactttacataaggcatgaaaagcagcctgcggaatcactagctacacagattgaggataaataccaactcactgacaaacggcacttgtgttcagagtgttcagagacggagtcatttttagaaatgccaggctagagagtgtttcagtatagccacccttgccg

SEQ ID NO: 4862 - DNA, 231 bp, Homo sapiens
  misc_feature 1..231: note = U/M: U (0.22:0.87) in Osteoblasts
  misc_feature 1..231: note = source = chr10:102787307-102787537; Gene: PDZD7 (intron)
  source 1..231: mol_type = genomic DNA
cgctttaccacagacccactggaccagaagctctgggactgagccctgcaatctatccctgaatgagccttcccggcaattctgaggcatctgaggtttgagaagcaccattctatcatgtcatcagatgatcacattctgactcttcccatcctttgtcgtcgttcgcttatttgtgatttatctgtctcttttcactagaccataagttcaatcatggtggggacttcg

SEQ ID NO: 4863 - DNA, 238 bp, Homo sapiens
  misc_feature 1..238: note = U/M: U (0.27:0.92) in Osteoblasts
  misc_feature 1..238: note = source = chr16:78433833-78434070; Gene: WWOX (intron)
  source 1..238: mol_type = genomic DNA
cggtgctacaccgtggcagcctgctgaaaatccccaaggaagattatatttttagttgagctacttgtcactgcactgtgtttttaatattgtgagtcctttcttgtcttcatttttgaagaatctattgcataccttgtcattcagaaaaacataaacgggacctctcaattagcggtaaagttcgtcagtttaacttttaagcttaaactcctgttatagttcggtcacttactcg

SEQ ID NO: 4864 - DNA, 268 bp, Homo sapiens
  misc_feature 1..268: note = U/M: U (0.27:0.92) in Osteoblasts
  misc_feature 1..268: note = source = chr17:29804489-29804756; Gene: RAB11FIP4 (intron)
  source 1..268: mol_type = genomic DNA
cgaagctgacagcagagccccaggtccccagacaagctgtggggagaagagcagcgcgggcgtcagaggcgcctggacaggcagccggcaggtccacagcaaggctgcaccttgttcttccttggtctctgggtggccagcactaggtctggcctgcggtttctgctcagtgattcttgtttgagtaaatgaatgacggggtgaatgaatgaatggtcttggttctatgatggttactttggggaagttattttattatacaaaaccg

SEQ ID NO: 4865 - DNA, 429 bp, Homo sapiens
  misc_feature 1..429: note = U/M: U (0.29:0.94) in Osteoblasts
  misc_feature 1..429: note = source = chr11:13702816-13703244; Gene: FAR1 (intron)
  source 1..429: mol_type = genomic DNA
cgttgtaccgtagtcctgtgaaataggtccaacatgggttggtggttgacagtctcaagagtaacaggcagttacttgatgctgtttgtgacagactgtattttctaaggatggttgcaacagtattttccatcgcacatgtgtgagcttgtacagaccctaactgttctctcattctgaggtgggatttaagtcccttgaatttgggcagtcttgtaaatcacttgtagccaatagaatgtggcagaaaattacactgtatgacttccaaggctaggtcagaaaaggtgagagagcttttgcctagctcacaagaatactggtctttaagccattagcagctttgtaagtatctgactattctgaggtccccatgctataaggaagcccaaactatctcatggggaaaatcgaagaggctaaagtccg

SEQ ID NO: 4866 - DNA, 448 bp, Homo sapiens
  misc_feature 1..448: note = U/M: U (0.27:0.92) in Osteoblasts
  misc_feature 1..448: note = source = chr11:68425532-68425979; Gene: GAL (Intergenic)
  source 1..448: mol_type = genomic DNA
cgggaaagtggcataagtaacaactgaggcagaactggaggaagacagagaagagaggcccagaggagcagacagggatgcaggacagaggggaagaacccttcacagccacgcatggatccagagtagagctcagaaagctacggcctgtgggctgaactggcccgctgcttgttttcataaataaagttttattggcacagggccacacttgttcatttctgtgttgtctgtggctactttcatgtagagttgagtagttttgacagaggctctgtggccagctcagcctaaaatattcactgtcagccgggcacggtggctcacgtctgataatcctagcactttgggaggccgaggcgggtggatcacctgaggtcaggagtttgaaaccagcctgaccaacatggtgaaaccctgtctccactaaaaatacaaaaattagccg

SEQ ID NO: 4867 - DNA, 160 bp, Homo sapiens
  misc_feature 1..160: note = U/M: U (0.3:0.92) in Osteoblasts
  misc_feature 1..160: note = source = chr11:114085364-114085523; Gene: ZBTB16 (intron)
  source 1..160: mol_type = genomic DNA
cgcccatcctggagtgcagtggcgcaattttggctcactgcaatctccgcctcccgggttcaagcgattctcatactttagcctcgtgagtagctgggactacaggcatgcgccaccacatccggctaatttttatatttttagtagagacggagtttcg

SEQ ID NO: 4868 - DNA, 185 bp, Homo sapiens
  misc_feature 1..185: note = U/M: U (0.31:0.92) in Osteoblasts
  misc_feature 1..185: note = source = chr3:152764051-152764235; Gene: RAP2B (Intergenic)
  source 1..185: mol_type = genomic DNA
cgtttgaaaactgcccaacagcgacccaaagcctatattaccgtagcctttgtccactgcttttggtttttcttttctttcttttttttttttttttttttgaaacggagtctggctctgtcgcccaggctggagtgcagtggcacgatctcggctcactgcaagctccgcctcccgggttcacg

SEQ ID NO: 4869 - DNA, 377 bp, Homo sapiens
  misc_feature 1..377: note = U/M: U (0.38:0.95) in Osteoblasts
  misc_feature 1..377: note = source = chr15:28423980-28424356; Gene: HERC2 (intron)
  source 1..377: mol_type = genomic DNA
cggagcaggagcaaaggccgccccgcacaggcctcctggtgcttggcttgtacctgagtgaacagccaccttcttgaccacgtagctgctgagagctgtgatctgccgtgggatgggcaccgtcccgctggaaatgcccagccccagccggccattcgtggcttctccacaggcatacaccttcccttccacagtcactgcaaggaacgacagccaggagaggactctcttttcacaacattaaaaacttttttgttttttggtgccaagcataatttaaaaattttttaagattagaataatcatacctgcaaacaaacttttagatccaccagccacctgtaccacattcaaagctgacagtgtctcagagaacg

SEQ ID NO: 4870 - DNA, 157 bp, Homo sapiens
  misc_feature 1..157: note = U/M: U (0.03:0.91) in Osteoblasts
  misc_feature 1..157: note = source = chr6:71012146-71012302; Gene: COL9A1 (intron)
  source 1..157: mol_type = genomic DNA
cgtgattcgcccgcctcggcctcccaaagtgctgggattacaagcataagccaccgcacccagccttcatttttactttgaaaccctactgagagatgtaaggaactcatgtttccagaccccactgtcgttgttgttttattgatctcaccttctc

SEQ ID NO: 4871 - DNA, 140 bp, Homo sapiens
  misc_feature 1..140: note = U/M: U (0.08:0.92) in Osteoblasts
  misc_feature 1..140: note = source = chr10:130929379-130929518; Gene: MGMT (Intergenic)
  source 1..140: mol_type = genomic DNA
cgtgcggctcagttttagtggcttttccagacctctgcggttgaacaaaacctcatgagaagatacatttagcaaatggtggggaaacctggaaatcgggacctggattattaaagggcgagaaggatttgtaatttaac

SEQ ID NO: 4872 - DNA, 158 bp, Homo sapiens
  misc_feature 1..158: note = U/M: U (0.12:0.86) in Osteoblasts
  misc_feature 1..158: note = source = chr19:57850780-57850937; Gene: ZNF304 (Intergenic)
  source 1..158: mol_type = genomic DNA
cgatctcagctcactacaacctccacctcccgagttcaagcaattctcctgcctcagcctcctgagtagctgggattataggcgcttgcaaccatgcccagctaatttttgtatttttagtagagacggggtttcaccatgttggccaggatggtctc

SEQ ID NO: 4873 - DNA, 315 bp, Homo sapiens
  misc_feature 1..315: note = U/M: U (0.05:0.88) in Osteoblasts
  misc_feature 1..315: note = source = chr6:71010703-71011017; Gene: COL9A1 (intron)
  source 1..315: mol_type = genomic DNA
cgttctaagagatcaaataaaagtcccgactagattaatcctaacatcttagaactgggaagagtaaaaagaagaagaaaataatcatgagaaggattaaatcctcaatttgataagaaatcatagaatggaattgtgttctccttacacaaatggaaggtcaaagggaagagagatttttcaccaccacagaaggcttcttggaaatatccaacctcagtgccttgctaagattcatctgacaacagagactctctagacttcaaaaaaagtattattcagttacaaagcataggcccggcgctgtggctcacg

SEQ ID NO: 4874 - DNA, 167 bp, Homo sapiens
  misc_feature 1..167: note = U/M: U (0.07:0.88) in Osteoblasts
  misc_feature 1..167: note = source = chr21:33300962-33301128; Gene: HUNK (intron)
  source 1..167: mol_type = genomic DNA
cgcacacggacataggtgattaggtggttgagacctcacattaaaatgcttgtttagaatatattcatagtggctttaacggaatgtcttgactttcaaagactctataccactaattttgggtgttcgtatttcagctgaccactggtatgttctttgctggagcg

SEQ ID NO: 4875 - DNA, 393 bp, Homo sapiens
  misc_feature 1..393: note = U/M: U (0.04:0.83) in Osteoblasts
  misc_feature 1..393: note = source = chr16:87665731-87666123; Gene: JPH3 (intron)
  source 1..393: mol_type = genomic DNA
cgcttctggctacagtctgttttttcagaggaattttccacctctctcctggataaagtaatcctccctgtttgggtggggtagcaagcagggtttttggttcagaatgagcactttcccagtgcctgctgaagcattggcgaaaagacgaaaaaaagagcacttccctggcagtcctcccccaccctcctctgcctggtgggcttgtctgattgttggcctagaaacttttcttcctgggttctgcagaaggagagaaaactctcttcctttcattcattatttatatttctcagcaatctggctttttatcctttttcttggtttgtcctaactttaagagatggagtcttgctctgccacccaggctggagtgcagtggcacgatcaccg

SEQ ID NO: 4876 - DNA, 294 bp, Homo sapiens
  misc_feature 1..294: note = U/M: U (0.14:0.9) in Osteoblasts
  misc_feature 1..294: note = source = chr9:121658020-121658313; Gene: DBC1 (Intergenic)
  source 1..294: mol_type = genomic DNA
cgccactgcactccagcctgggagacagagggagattccttctaaaaaaaaaaaaaaaaaaaaaaaagaataagggttcactgaaatgttctctgtgtaccatgctaggtgagaggtaagttggtgggtggtagtaatggacaaggcaaggaaaccttcacgttcttttggatctctattttccataggagcagttcgaaacctagagaaattaagactgttctaagatcacagtcagcacaggatgaaatcctgcgccttccggttccaaaagtagtgttcgctttttttacg

SEQ ID NO: 4877 - DNA, 82 bp, Homo sapiens
  misc_feature 1..82: note = U/M: U (0.23:0.91) in Osteoblasts
  misc_feature 1..82: note = source = chr12:117630835-117630916; Gene: FBXO21 (Intergenic)
  source 1..82: mol_type = genomic DNA
cgctggagtgcaatggcacgatctcggctccctgcaactttggcctcctgggttcaagagattcttccgcctcagcctcccg

SEQ ID NO: 4878 - DNA, 304 bp, Homo sapiens
  misc_feature 1..304: note = U/M: U (0.02:0.94) in Osteoblasts
  misc_feature 1..304: note = source = chr22:25310719-25311022; Gene: SGSM1 (intron)
  source 1..304: mol_type = genomic DNA
cgtcaaccacggggcagttgattcctctttcccggaagtacagtcttttgtgttaggagtacaacgcattctatcacatttgatttggatccattttcctgttggtggtcatttaggctgtttttatttggtttggttttgcttttgctttggggaatttggggttttgtttttggcctttataaacagtgctgcggccgggcacggtttctcacgcttgtaatcccagcactttgggaggctgaggcgggcggatcacgaggtcaggagattgagaccatcatggctaacacggtgaaacccc

SEQ ID NO: 4879 - DNA, 65 bp, Homo sapiens
  misc_feature 1..65: note = U/M: U (0.08:0.96) in Osteoblasts
  misc_feature 1..65: note = source = chr17:25927592-25927656; Gene: KSR1 (intron)
  source 1..65: mol_type = genomic DNA
cgtgccatccttttatacagcttgtagttccgtggattatttcccgccagcgtcaccacagacac

SEQ ID NO: 4880 - DNA, 92 bp, Homo sapiens
  misc_feature 1..92: note = U/M: U (0.05:0.9) in Osteoblasts
  misc_feature 1..92: note = source = chr20:47056018-47056109; Gene: LINC00494 (Intergenic)
  source 1..92: mol_type = genomic DNA
cgcctcagcctcccaaagtgctgggattacagatgtgagccaccgcgcctggcccaataattatttttaaaaacggaggatgtgatagattc

SEQ ID NO: 4881 - DNA, 166 bp, Homo sapiens
  misc_feature 1..166: note = U/M: U (0.15:0.89) in Osteoblasts
  misc_feature 1..166: note = source = chr6:3075149-3075314; Gene: RIPK1 (Intergenic)
  source 1..166: mol_type = genomic DNA
cgtgatccgcccgcctcagcctcccaaagtgctgggattacagacgtgagccacggcgcccagccgggatgtgggtatttctggaatacaaaacatccatagccctccttttactctcaaagcaaaacacagacacgcacattcacatgcacacaccagtgtgtcc

SEQ ID NO: 4882 - DNA, 271 bp, Homo sapiens
  misc_feature 1..271: note = U/M: U (0.21:0.93) in Osteoblasts
  misc_feature 1..271: note = source = chr2:25456972-25457242; Gene: DNMT3A (exon)
  source 1..271: mol_type = genomic DNA
cgcaaggcaaagccctccggtatttccgcctctgtggtttttgttttaaattcctttttctcttctgggtgctgatacttctctccatcctcatgttcttggtgttttattatgttttgtgttttttgtttgtttgtttaactttgtgtcgctacctcagtttgcccccatgtcccttacacacacgcaaaatactccttcagcggagcgaagaggtggcggatgactggcacgctccatgaccggcccagcagtctctgcctcgccaagc

SEQ ID NO: 4883 - DNA, 49 bp, Homo sapiens
  misc_feature 1..49: note = U/M: U (0.05:0.94) in Osteoblasts
  misc_feature 1..49: note = source = chr9:99316377-99316425; Gene: CDC14B (intron)
  source 1..49: mol_type = genomic DNA
cggaggttgcagtgagccgagatcgcgccactgcactccagcatgggcg

SEQ ID NO: 4884 - DNA, 158 bp, Homo sapiens
  misc_feature 1..158: note = U/M: U (0.09:0.91) in Osteoblasts
  misc_feature 1..158: note = source = chr9:94565110-94565267; Gene: ROR2 (intron)
  source 1..158: mol_type = genomic DNA
cgaaaggcattcaggggccacacaagaacaaaccaaccacaaaatgggcaacaaacttcagcagacatttctccaaagaagacatgtatatggccaccgagcacaccgaaagatgctcaacatcgttagccgttaaggaaacgcaaatcacaaccacg

SEQ ID NO: 4885 - DNA, 201 bp, Homo sapiens
  misc_feature 1..201: note = U/M: U (0.07:0.86) in Osteoblasts
  misc_feature 1..201: note = source = chr22:33403343-33403543; Gene: SYN3 (promoter-TSS)
  source 1..201: mol_type = genomic DNA
cgcaagtacatgcctttttttctttttctttcctcttacttatatttttctaattttctagagtgcttattactatggaccggcatgtcccccacctcaccaaatttatatgttgaagataatgctgaatatgatgcttcggaaatgagccctttgggaggtaattatggttagtggggtcatgagggtgtggcccacgcg

SEQ ID NO: 4886 - DNA, 258 bp, Homo sapiens
  misc_feature 1..258: note = U/M: U (0.13:0.89) in Osteoblasts
  misc_feature 1..258: note = source = chr14:34085388-34085645; Gene: NPAS3 (intron)
  source 1..258: mol_type = genomic DNA
cgtaagctggacaacgggtctgttgggagttgagctagaaagagtcgatgcattctgtcgaggccaccaagccctcacagacgaagatgtgatgtgcttcgtatgaacttatggaacagagttacactagttgctctgttctgaaagatgttcttgacattttctttattggtgaatgaatttgtgtttacctttggccacttgctgaggtcaggagcatgggaacaccctgtgtcgctctatggaaatgccaaggcg

SEQ ID NO: 4887 - DNA, 314 bp, Homo sapiens
  misc_feature 1..314: note = U/M: U (0.15:0.91) in Osteoblasts
  misc_feature 1..314: note = source = chr6:2414868-2415181; Gene: LOC100508120 (TTS)
  source 1..314: mol_type = genomic DNA
cggacgggttgggtctcagatccagcaaagaagccagcttgaaaaatcattctgggaaatgcactgaatcacttgttccaggaacagaaagccactgtgccttgagaaacaggccgtcggcaaagtccctgagacaagcaccctcggatttgctgtccaatcgtcaccgtcctcccttcattctagggctttctgtcacttcactactcatattattgagggcttgacttctgctaacaggttctcttaaaagactatctggagacagctttttaagagccttccctttccggatccctttgggatagaaaccg

SEQ ID NO: 4888 - DNA, 100 bp, Homo sapiens
  misc_feature 1..100: note = U/M: U (0.18:0.92) in Osteoblasts
  misc_feature 1..100: note = source = chr22:50054483-50054582; Gene: C22orf34 (Intergenic)
  source 1..100: mol_type = genomic DNA
cgctcctcctccgagccccgcacacggcgcgggttacatggaaaaggcaccgcagctccccgtgacgtcctctcctcctcggagccccgcacacggcgcg

SEQ ID NO: 4889 - DNA, 284 bp, Homo sapiens
  misc_feature 1..284: note = U/M: U (0.14:0.88) in Osteoblasts
  misc_feature 1..284: note = source = chr20:11252715-11252998; Gene: LOC339593 (intron)
  source 1..284: mol_type = genomic DNA
cgggggtgcccgctgggatctgtgagcaggcagaggccggtgggagcaccctccgcctccctttgttccgccgggctccagcctgcagcagctgatccggttattatgctcctgaaaagaatttctaggtggccacagtgaccataaggagcagagaaaccacgagggctgcaagccacgaagagcaacacatcggctattgagcactaatcccacccataattagaggatcccttcagccttgtggtgctcacagaaatctgaactaaggcagagaggagccg

SEQ ID NO: 4890 - DNA, 178 bp, Homo sapiens
  misc_feature 1..178: note = U/M: U (0.18:0.9) in Osteoblasts
  misc_feature 1..178: note = source = chr9:98545897-98546074; Gene: ERCC6L2 (Intergenic)
  source 1..178: mol_type = genomic DNA
cgtgagatagggtgagggaacaggacacctggagcggttggagcggtggccacccacctgtgacggggaggtgggggcgctgagaacagagacgggaggctgtccgagtggccctgacactgcagagcccagagctgagctcacgcctccgcctctgggcttcctgttacccacagcg

SEQ ID NO: 4891 - DNA, 190 bp, Homo sapiens
  misc_feature 1..190: note = U/M: U (0.33:0.93) in Osteoblasts
  misc_feature 1..190: note = source = chr20:17905267-17905456; Gene: SNORD17 (Intergenic)
  source 1..190: mol_type = genomic DNA
cgaggcgggtgatcacttgaggttaggagttcaagaccagcgtggccaacatggtgaaaccccgtctctacaaaaaatacaaaaattagccaggcatggtggcatacacctgtagtcccagctacttgggaggctgaggcacgagaattgcctgaacctgggaggcagaggttgcagtgagccgaggccg

SEQ ID NO: 4892 - DNA, 89 bp, Homo sapiens
  misc_feature 1..89: note = U/M: M (0.86:0.16) in Osteoblasts
  misc_feature 1..89: note = source = chr18:77397505-77397593; Gene: CTDP1 (Intergenic)
  source 1..89: mol_type = genomic DNA
cgtctctctctgtctttagggtccgtttccttcctaaggcaggtgcagagcccggccttgctgcgccttcggggcgcgggcatctcccg

SEQ ID NO: 4893 - DNA, 98 bp, Homo sapiens
  misc_feature 1..98: note = U/M: M (0.9:0.21) in Osteoblasts
  misc_feature 1..98: note = source = chr4:13533239-13533336; Gene: LOC285547 (promoter-TSS)
  source 1..98: mol_type = genomic DNA
cggcagccacgaaaagcgctcttacaaacatctgatattccagtgaccttccttcactaactccctaaataatactgcgcctcacaggcgctaatccg

SEQ ID NO: 4894 - DNA, 54 bp, Homo sapiens; identical to SEQ ID NO: 736
  misc_feature 1..54: note = U/M: M (0.8:0.16) in Osteoblasts
  misc_feature 1..54: note = source = chr4:13536606-13536659; Gene: LOC285547 (Intergenic)
  source 1..54: mol_type = genomic DNA

SEQ ID NO: 4895 - DNA, 248 bp, Homo sapiens
  misc_feature 1..248: note = U/M: M (0.72:0.12) in Osteoblasts
  misc_feature 1..248: note = source = chr4:13535466-13535713; Gene: LOC285547 (Intergenic)
  source 1..248: mol_type = genomic DNA
cgttgggcctttgccccccaggacccgcccccagcagtccagaagaacaagaatgagaacttggccaggcttggagactgctagctggtcgtgctgcccccacaccagctttgcaagggtctccaggccctcagaggggtaggtaggaaaaggtgtgatggcaacagacatagatgaagctgaaggatcctggccttattcgtgtgttcttccagtatggtttggacgccaaaaagcaacaaaccccg

SEQ ID NO: 4896 - DNA, 262 bp, Homo sapiens
  misc_feature 1..262: note = U/M: M (0.55:0.07) in Osteoblasts
  misc_feature 1..262: note = source = chr4:13532927-13533188; Gene: LOC285547 (promoter-TSS)
  source 1..262: mol_type = genomic DNA
cgttagtgatccggacctcagatccggtttccgagggcgccagggtcctagggctgaggtccattcaaatgcttaggcgactctgccgcaggcctccggaagaggcccggtcgttaagaaagggggcggggtaaggaggaacggctagcacctagagctggggcctggcctctgcccccaccgccctgcctttggcaaccagcgaatcaggactgaaacgtagggacacagagggacagagactaagtccaggatagcgacg

SEQ ID NO: 4897 - DNA, 221 bp, Homo sapiens
  misc_feature 1..221: note = U/M: M (0.74:0.78) in Osteoblasts
  misc_feature 1..221: note = source = chr15:20779839-20780059; Gene: GOLGA8CP (exon)
  source 1..221: mol_type = genomic DNA
cgacattaacaggagagcagcagtacgattttgccgatggaataacagatttgccggcaatcactgaaagagtgcaaatatcgggtccttgtgacttcaacggactcttccaaattgtatgaatgtatcaatgtattagataaacccagtttcagaatgataaagaaaaaatgttagaccaaataatgcggctagttaacagtggtacgatttctagcccg

SEQ ID NO: 4898 - DNA, 380 bp, Homo sapiens
  misc_feature 1..380: note = U/M: M (0.95:0.14) in Osteoblasts
  misc_feature 1..380: note = source = chr1:119542629-119543008; Gene: TBX15 (Intergenic)
  source 1..380: mol_type = genomic DNA
cgcccccacgggactcagaaccctgaggctcttctagagacaccaacttgcggtggtggggtgggggtggggaggcgtggtgaggaagagtggggtgggggctgatctggatctgtagagtcaccaaatacaccaataaaccgcaaagaagccaccaagtagccatgcccctactcaagctcaaagctagaaggctagctgaaggctccttgtcaattttccctgcgctcaggctagctgttccaccggaaggactgggggagattcagattatttgggagacctggatcagtattaggttttcagaggttagcggggtacagaggttagcgggtttcttgatggtggaattgtttatttgtgacccggccacctgggcg

SEQ ID NO: 4899 - DNA, 147 bp, Homo sapiens
  misc_feature 1..147: note = U/M: M (0.91:0.12) in Osteoblasts
  misc_feature 1..147: note = source = chr16:86612280-86612426; Gene: FOXL1 (exon)
  source 1..147: mol_type = genomic DNA
cgcccgggtctcctgcgttgcggggagcgcagcgcaggctctcgcttgccatgagtcacctcttcgatccccggctgcctgccctggccgcctcgcccatgctgtatctgtacggtcccgagagacccggcctccctctggccttcg

SEQ ID NO: 4900 - DNA, 367 bp, Homo sapiens
  misc_feature 1..367: note = U/M: M (0.87:0.08) in Osteoblasts
  misc_feature 1..367: note = source = chr1:119543088-119543454; Gene: TBX15 (Intergenic)
  source 1..367: mol_type = genomic DNA
cggccaagcaaagtgctcgaaagtgtagctgggacgcccacgccggaagcctggagaggcaagttgcgagttcgcagggcttgggagttttttgcggcggaagaagctgaatctaggggctgagtccccgggaagggatggccgcctcttagctttcgccaggagattatcttggagcccagcggccgagattgagagctctttctgcggaacctgcctccggagtcagatgagcaaggggaccgccacgtcctcaccgagctcccagcggcctttggggcgggtccggggacaagccggaggactaggcttctcccagagcgcggctgtctttcccggaaagacccaagtgcgcgatgtcagcccg

SEQ ID NO: 4901 - DNA, 132 bp, Homo sapiens
  misc_feature 1..132: note = U/M: M (0.94:0.16) in Osteoblasts
  misc_feature 1..132: note = source = chr18:77397614-77397745; Gene: CTDP1 (Intergenic)
  source 1..132: mol_type = genomic DNA
cgcgctggaagccgccgcccgccctggcccgcggtgagtccaggggaggccgcgctctgtggccacggctgtaatttgaaggggcggcctcaggcccaccccagtgaggcaccagcacccgcatcagctccg

SEQ ID NO: 4902 - DNA, 264 bp, Homo sapiens
  misc_feature 1..264: note = U/M: M (0.87:0.1) in Osteoblasts
  misc_feature 1..264: note = source = chr16:86613132-86613395; Gene: FOXL1 (exon)
  source 1..264: mol_type = genomic DNA
cgggaaagcagggccagaagccgccttcaggggacgaactcctagggggtgccaagcctgggcccggcggccgtctgggtgcctcgctcctggccgcctcctccagcctccgtccgcctttcaacgcttccctgatgctcgacccgcatgtccagggcggcttttaccagctcgggatccccttcctctcttatttccccctgcaggttcccgacacggtactccacttccagtaaagcaaacaatggcacggttcttctcccg

SEQ ID NO: 4903 - DNA, 402 bp, Homo sapiens
  misc_feature 1..402: note = U/M: M (0.83:0.08) in Osteoblasts
  misc_feature 1..402: note = source = chr16:86610170-86610571; Gene: FOXL1 (Intergenic)
  source 1..402: mol_type = genomic DNA
cgcgcggccccggagaggttgggtgaccccagagactgtggggcctgcgggttgcaaaggcgctggcattgaggtttcttcaccccaagtttgaaaggggtacgcgggtgagagcgagtggtaacgaaaagacaaagcctcgcccctcctggccagaggttcacccccaggacctaggcgggcgcggccgggctgctcgctggacccacgttagaggagcagggccgcggagggaggcccgaggtgtcccagggactggcctgtcgctcccgcaggcagtgccggtacccaggccggtttttccacccttcctgcgacttcctttttggtattttaaatttacccgctcccctgcggtctacttattccatgggctggatacccaggaaccccaaacacacg

SEQ ID NO: 4904 - DNA, 143 bp, Homo sapiens
  misc_feature 1..143: note = U/M: M (0.84:0.12) in Osteoblasts
  misc_feature 1..143: note = source = chr7:27228664-27228806; Gene: HOXA11-AS (exon)
  source 1..143: mol_type = genomic DNA
cgcccggagaggagaaggccaacgcctgcgccaggcttgtcaggcggaaacggctaacaaggagatttggtcagcaaaacagacccagcctttccgaggcttcgtctgacttggcccgaaaggttggggagggggggcttgcg

SEQ ID NO: 4905 - DNA, 56 bp, Homo sapiens
  misc_feature 1..56: note = U/M: M (0.86:0.18) in Osteoblasts
  misc_feature 1..56: note = source = chr19:18899000-18899055; Gene: COMP,COMP (intron,exon)
  source 1..56: mol_type = genomic DNA
cgtgccgagccgtagatctaccttttcattggggaccccgtccccgtcggcatccg

SEQ ID NO: 4906 - DNA, 99 bp, Homo sapiens
  misc_feature 1..99: note = U/M: M (0.82:0.14) in Osteoblasts
  misc_feature 1..99: note = source = chr12:114838313-114838411; Gene: TBX5 (intron)
  source 1..99: mol_type = genomic DNA
cggggcgaaaagacaagttggcagatctcggctcactcagcgatggcgggaacggtcgaatggaggcctctccctccgagccccggagccaaagcctcg

SEQ ID NO: 4907 - DNA, 205 bp, Homo sapiens
  misc_feature 1..205: note = U/M: M (0.82:0.14) in Osteoblasts
  misc_feature 1..205: note = source = chr5:72740179-72740383; Gene: FOXD1 (Intergenic)
  source 1..205: mol_type = genomic DNA
cgcggcccacacctctcgcagctcatacctcacccgccccgcggccctgcttcccccagtctcatcctctcgggagcaggcccgcagggtctgcaaggccaagaacggaaccccaaacgcagagggtggggaggtgagcggcaggacgcaaaactcggaatcgaggcggcttgggtttacacgttcctttagctctgggctcacg

SEQ ID NO: 4908 - DNA, 321 bp, Homo sapiens
  misc_feature 1..321: note = U/M: M (0.74:0.09) in Osteoblasts
  misc_feature 1..321: note = source = chr12:114833665-114833985; Gene: TBX5 (intron)
  source 1..321: mol_type = genomic DNA
cgttcttgctggagccagggctagtcacagatgagcatcctcaccaataaaactgggtttgttgttctgatgacgctagtatttaccagaacgctctgacacatccccaccgaacttgcgaatcgccgcgtttaacagcctgaaaatctggcctgctttttcccgggaactgcggaggttgtctctgtgactttgattatttgcattgatgaccctggggcaagattcttggaccaaccctggagtccggccccgatcgagtggaggtagttgggggaggcgagccgcggccgggggcgggggagggacgaggaactcgcg

SEQ ID NO: 4909 - DNA, 36 bp, Homo sapiens
  misc_feature 1..36: note = U/M: M (0.84:0.21) in Osteoblasts
  misc_feature 1..36: note = source = chr12:114838431-114838466; Gene: TBX5 (intron)
  source 1..36: mol_type = genomic DNA
cgagcgcgcccggaggcggaggcgcagaagacttcg

SEQ ID NO: 4910 - DNA, 387 bp, Homo sapiens
  misc_feature 1..387: note = U/M: M (0.71:0.09) in Osteoblasts
  misc_feature 1..387: note = source = chr4:13540614-13541000; Gene: NKX3-2 (Intergenic)
  source 1..387: mol_type = genomic DNA
cgggagccgcgtctgcggcagaagacccaggtaaagacattggtctgggtcgcaaaatacggcgagaactccttggaggacaggctggacccagaggtcgcctccagctcccagaatcagacctcagggcattctcgccaaggcaaaccgcgggacagcttggagggaaacagccataatctggatcaaactgaattcatttgagtcattttccccgggcagccggagccagtccgcggagctggcccaggcagggggcccgagagtgggagagaaagggaaggggcgcccgggtccgcagggtaggtggagtctgcggtggaagatggagccgccaggggtgcgaccgggacctctgtggcttttcctactctaaagaaactcccg

SEQ ID NO: 4911 - DNA, 106 bp, Homo sapiens
  misc_feature 1..106: note = U/M: M (0.75:0.15) in Osteoblasts
  misc_feature 1..106: note = source = chr4:13530923-13531028; Gene: LOC285547 (intron)
  source 1..106: mol_type = genomic DNA
cgctgcggcggggaaggaggaccgtcgggcccagagttcccgccgccacatatggtctgtggatttaggtgtcaaaaaccggagaattagaaatggtaattttccg

SEQ ID NO: 4912 - DNA, 101 bp, Homo sapiens
  misc_feature 1..101: note = U/M: M (0.62:0.08) in Osteoblasts
  misc_feature 1..101: note = source = chr4:13536483-13536583; Gene: LOC285547 (Intergenic)
  source 1..101: mol_type = genomic DNA
cgctgggggacgctgaggttccgagttggcattgtgggcattgcccagccactcctgcccggccaggtcctctgtgaggaaagcggtggcaccccagcgcg

SEQ ID NO: 4913 - DNA, 138 bp, Homo sapiens
  misc_feature 1..138: note = U/M: M (0.61:0.07) in Osteoblasts
  misc_feature 1..138: note = source = chr6:41341201-41341338; Gene: NCR2 (Intergenic)
  source 1..138: mol_type = genomic DNA
cgccctcgaggccaccgggctcctgcgagcaacgcttccctgcggcgaccgcgcgctgggatcactcaacaccaagaaaaaaaaaatgcactgggaacgacagaaacctgccttagcgaactatcctctagtggatcg

SEQ ID NO: 4914 - DNA, 441 bp, Homo sapiens
  misc_feature 1..441: note = U/M: M (0.53:0.04) in Osteoblasts
  misc_feature 1..441: note = source = chr4:13535985-13536425; Gene: LOC285547 (Intergenic)
  source 1..441: mol_type = genomic DNA
cggaacgtctttttctttctcaccacctctgtgtgggtgtgtctctagcttcctttctcgcagtcctagggtccaagaatgcattgctcaacttctccggaaaagaggaggggcagtgcccccggcctcctccgcaaacagggattcctagaagccagtcaccttggtgacagctctgcaccccatccaggatgcacacggaggacgtcctgctgcagcctgactttggcaggaatactctcgacccgtttgtgagcaggtttactacttggtttttgaattctcaagagcatcaaatccattgacgcccttcccaaaaacacaagccaaaaggaagtagaccggcacaaaccccaggcctgccgatccctcgaagcttcggggacaattcagggccatttatatggtcacccaagctccttagcgacctctgaacccacg

SEQ ID NO: 4915 - DNA, 392 bp, Homo sapiens
  misc_feature 1..392: note = U/M: M (0.53:0.07) in Osteoblasts
  misc_feature 1..392: note = source = chr19:18899119-18899510; Gene: COMP,COMP (exon,intron)
  source 1..392: mol_type = genomic DNA
cgcagttgtcctgggggcgggcacagaaggtgtgaggggcgcggtcatgaagtcccgccctccctcctgcccaagcccgccccgctccgcccccacccaccttacggcactggcgctccgggcagcgcagcttctcgtccgggaagccgtctaggtcagtgtcgcgaccacagaggatcccgttgccggcccagccaacggcacactgtgggagagtgtaagtgggtgccctggagtggccgccacccaaccccgcctcaagcccagcccgcccgcactcaccacgcacgaccgcgagccatcgcgctctaggacgcagtctgcatgctcgtggcactcgctgggcgagccgtcggggcagaagcgctgtgcgcgccgctggcagccggacg

SEQ ID NO: 4916 - DNA, 491 bp, Homo sapiens
  misc_feature 1..491: note = U/M: M (0.51:0.07) in Osteoblasts
  misc_feature 1..491: note = source = chr2:176968736-176969226; Gene: HOXD11 (Intergenic)
  source 1..491: mol_type = genomic DNA
cgggatgccggcgggtggaagagaaatctggaaccgttgtaaatattcatgtggggggatgccccttcacccttcacccgcctctcccagctgcattcccccctcagtgatagtgggggagggcaaggcgactgccccactgtccttagacaaaggtgatctccccatatttttgttctccagtcgcttgacttaagaagtccattccgaaggctctgtagggaaggaactggctctgggtgttttccctgcatttctcttctttcgtttcttaaaagagcataaataattaaagtttggcagggaggaaaagctttcttgcagaactgtagtggcaataaatgaaatgactcagaatcccttccccagtcagcttttacgagagctgccagacagtgtctgttcacgttctccagataccaggggcgccctgacaaagttaaggtcaagttagtgtcttatcttgggtgactcaaaatcaccgcatcgcg

SEQ ID NO: 4917 - DNA, 125 bp, Homo sapiens
  misc_feature 1..125: note = U/M: U (0.31:0.93) in Skeletal Muscle cells
  misc_feature 1..125: note = source = chr19:8203063-8203187; Gene: FBN3 (exon)
  source 1..125: mol_type = genomic DNA
cgcgcatcagagccatgggggttgagtcgcgctggcccaagagggggacccatgccattggatccgaagcccaggaggccagggaagaggccagggtggccgggtagcagcggcagccgctgggc

SEQ ID NO: 4918 - DNA, 227 bp, Homo sapiens
  misc_feature 1..227: note = U/M: U (0.35:0.94) in Skeletal Muscle cells
  misc_feature 1..227: note = source = chr1:55667004-55667230; Gene: USP24 (intron)
  source 1..227: mol_type = genomic DNA
cgcagtggctcatgcctgtaatcgcactttgggaggccaaggcaggtggatcacgaggtcaggagtttgagaccagcctggccaagatggtgaaaccccatctctactaaaaatacaaaaatcagctgggcgcagtggcaggtgcctgtaatcccagccactcgggaggctgaggcaggggaatcgcctgaacccggaaggcagaggttgcaatgagccgagatcac

SEQ ID NO: 4919 - DNA, 185 bp, Homo sapiens
  misc_feature 1..185: note = U/M: U (0.34:0.92) in Skeletal Muscle cells
  misc_feature 1..185: note = source = chr19:3442501-3442685; Gene: NFIC (intron)
  source 1..185: mol_type = genomic DNA
cgcaaatagctgggactgggactacaggcgcctgccaccatgaccagctaatttgtgtatttttagtagagatggagtttcaccatgttggccaggctggtctcaaactcctgacctcaagtgatccgcccgcctcggcctcccacagtgctaggatgacaggtgtgagccaccgagcccagccc

SEQ ID NO: 4920 - DNA, 81 bp, Homo sapiens
  misc_feature 1..81: note = U/M: U (0.32:0.89) in Skeletal Muscle cells
  misc_feature 1..81: note = source = chr20:48908487-48908567; Gene: LOC284751 (promoter-TSS)
  source 1..81: mol_type = genomic DNA
cgccctcctgggcatctgtttcctcatctgatgaacaggggtgacggcgatgcctccctggcaaggtccgcagaggatccc

SEQ ID NO: 4921 - DNA, 156 bp, Homo sapiens
  misc_feature 1..156: note = U/M: U (0.32:0.89) in Skeletal Muscle cells
  misc_feature 1..156: note = source = chr3:48127949-48128104; Gene: MAP4 (intron)
  source 1..156: mol_type = genomic DNA
cgaaaccccgtctctactaaaaatacaaaaatcagccgagtgtggtggcacatgcctataatcccagctactccggaggctgtggcaggagaactgcttgaactccggaggtagagtctgcagtgagccgagatcctgccactgtccagcctgggc

SEQ ID NO: 4922 - DNA, 324 bp, Homo sapiens
  misc_feature 1..324: note = U/M: U (0.36:0.92) in Skeletal Muscle cells
  misc_feature 1..324: note = source = chr10:23353063-23353386; Gene: MSRB2 (Intergenic)
  source 1..324: mol_type = genomic DNA
cgagccccggggccaggcgagacaggtgggctgtccctggaaggttctgctgtcgctaccccgatccgggctggacaatggggtaccccttttctttcccagagtgtctgatctgctctgagagcatgtccagctgcaaccaagaaattggaaggcttcagcacatgaaaggtgaactttccaaaagccttggcttctttctcaaccgcgcaggaagaggtttatgtttgggatattggatagcagttcgggcccggttaacacagctctcccaccacaaatcaccccactgcattctcagatgacactggccatataagcgcc

SEQ ID NO: 4923 - DNA, 470 bp, Homo sapiens
  misc_feature 1..470: note = U/M: U (0.34:0.9) in Skeletal Muscle cells
  misc_feature 1..470: note = source = chr2:127072611-127073080; Gene: GYPC (Intergenic)
  source 1..470: mol_type = genomic DNA
cggtcttcgggtgttttctcctctaggcgaaacactgatccacataatgtttatgtgaatattagcacttaccttttcattcgggataattcagggatatgtagaaaaagagacacaaaatagacaccactctaagcattattctggagctgaagcatgacattctgcttttctctctcttatattttttttttttctgagactgggtctggctctgtcgcccaggctggaatgcagtctccgctcactgcaagctccgcctcccgggttcacgctattctcctgcttcagcctcctgagtagctgggattacacgcacctgccaccacgcccggctaattttttatatttttagtagagatggggtttcaccatgttagccagatggtctcaatctcctgacctcgtgatccacccgcctcagcctcccaaagtgctgggattacaggcgtaagccaccatgcccggcc

SEQ ID NO: 4924 - DNA, 63 bp, Homo sapiens
  misc_feature 1..63: note = U/M: U (0.32:0.87) in Skeletal Muscle cells
  misc_feature 1..63: note = source = chr2:110806181-110806243; Gene: MIR4267 (Intergenic)
  source 1..63: mol_type = genomic DNA
cgtgacagctgtaacagcaagcctgcgctgaggacacgggacgtggtggctggtgccgaggtc

SEQ ID NO: 4925 - DNA, 69 bp, Homo sapiens
  misc_feature 1..69: note = U/M: U (0.33:0.88) in Skeletal Muscle cells
  misc_feature 1..69: note = source = chr15:98977214-98977282; Gene: FAM169B (Intergenic)
  source 1..69: mol_type = genomic DNA
cgaaggctccgtgcatagcagtgagtgtccgtcaccactgccagaccctggtccggaatgcaagcttcc

SEQ ID NO: 4926 - DNA, 194 bp, Homo sapiens
  misc_feature 1..194: note = U/M: U (0.36:0.9) in Skeletal Muscle cells
  misc_feature 1..194: note = source = chr8:33401219-33401412; Gene: RNF122 (Intergenic)
  source 1..194: mol_type = genomic DNA
cggcttcccgggttcaagcgattctcctgcgtcagcctccccagtagctgggattacatgcacccgccaccatgtctggctaattttttatttttagtagagatagggtttcaccatgttggcaggctggtctcaaacttctgacctcaagtgatctaactgcctcggcctcccaaagtgctagaattacaggc

SEQ ID NO: 4927 - DNA, 302 bp, Homo sapiens
  misc_feature 1..302: note = U/M: U (0.31:0.85) in Skeletal Muscle cells
  misc_feature 1..302: note = source = chr19:4893283-4893584; Gene: ARRDC5 (intron)
  source 1..302: mol_type = genomic DNA
cgaggcaggaggatcacctgaggtcaggaatttgagaccagcctggccagcgtggtgaaaccccatctctactaaaaatacaaaagttggccgggtgtgatggcacgcaactgtaatcccagctactcaggaggctgaggcaggagaatcacttgaacctgggagactgaggttgcagtgaggctgagatccagccctgcactccagcctgagcaacagagtgagactctgtctcaaaaaaaaaaagaaaagaaaagaaaagaaaatgcttgtattccaccaaatggatttttgcaacccac

SEQ ID NO: 4928 - DNA, 305 bp, Homo sapiens
  misc_feature 1..305: note = U/M: U (0.36:0.89) in Skeletal Muscle cells
  misc_feature 1..305: note = source = chr2:110806415-110806719; Gene: MIR4267 (Intergenic)
  source 1..305: mol_type = genomic DNA
cgccttgcaatcaacatcatagaatagtggagctgacatttcatctcctggcacagaaacactctcatttacacctggggaggctgagacccaaagcagttgagtgacctcacaaagctaccctgaagccctggagggagggctggcctgggtgcgggtgcagtgcatccaagcccctgtctgtgcccttggcaagtcaggaagcttggtgtgggctcctgcctcatcctcagccactcacgcaaaccaaacctgtgctgggcacgaaggcagcttgtggcctccttcgggactgaagaccaagc

SEQ ID NO: 4929 - DNA, 59 bp, Homo sapiens
  misc_feature 1..59: note = U/M: U (0.35:0.87) in Skeletal Muscle cells
  misc_feature 1..59: note = source = chr4:1689116-1689174; Gene: FAM53A (Intergenic)
  source 1..59: mol_type = genomic DNA
cggacgcagtggcgggcgcctgtaatcccagctactccagaggctgaggcaagagaatc

SEQ ID NO: 4930 - DNA, 129 bp, Homo sapiens
  misc_feature 1..129: note = U/M: U (0.36:0.88) in Skeletal Muscle cells
  misc_feature 1..129: note = source = chr1:156724345-156724473; Gene: HDGF (Intergenic)
  source 1..129: mol_type = genomic DNA
cgggcataagcctgcttcccctgggattcacatctaacctagtgctttgcagacgttaacgtgcaatcaaatcacctgggaatccctttttaaaagagtgtagattctaggccgggcatggtggctcac

SEQ ID NO: 4931 - DNA, 261 bp, Homo sapiens
  misc_feature 1..261: note = U/M: U (0.39:0.91) in Skeletal Muscle cells
  misc_feature 1..261: note = source = chr17:5430619-5430879; Gene: NLRP1 (intron)
  source 1..261: mol_type = genomic DNA
cgaattcacgttgggcttcatcgaaagccatcctgggccgcatgtggcccacaggccgcaggttgtacaagcttgtgtacggagtccaaagggagtaaatcctatctggccacaaggtgaggctcagaatttggtctagagaaggctagtgggacatgggcttgggcaggactggggaggggtaggggtgtagctcttagcctgggataaacaggacttgggatagaatcccaactctggaagagggtcttcacctctctc

SEQ ID NO: 4932 - DNA, 365 bp, Homo sapiens
  misc_feature 1..365: note = U/M: U (0.37:0.89) in Skeletal Muscle cells
  misc_feature 1..365: note = source = chr16:21517221-21517585; Gene: LOC100271836 (Intergenic)
  source 1..365: mol_type = genomic DNA
cgagtttctgttcctgaaacacaccaggcctttctggcctctggatttttgtacttgctgttcccgccatctggaatgccttccctgcatttgttcccatcagggttgggactagcaaagtgacaggtgatggagttgctgagggtgcaaaatttaaggaggcacctactcccagggtcatgcaaaagccaactttgcatttgcacaatcctgtgagtgagtccctccttaaatttgaggctgtactgtaatcccagctactcaggaagctggggcaggagaattgcttgaacctgggaggcagaggttgcagtgggccgagatcctgccattgcactccagcctgggcaacagggcgagaatcc

SEQ ID NO: 4933 - DNA, 128 bp, Homo sapiens
  misc_feature 1..128: note = U/M: U (0.35:0.86) in Skeletal Muscle cells
  misc_feature 1..128: note = source = chr19:49021090-49021217; Gene: LMTK3 (Intergenic)
  source 1..128: mol_type = genomic DNA
cggattcaagcgattctcctgcctcagcctcctgagtagctgggattacaggtgcgtgccaccacgccccgctaatttttctatttttagtagagatagtatttcaccatgttggccaggctggtctc

SEQ ID NO: 4934 - DNA, 171 bp, Homo sapiens
  misc_feature 1..171: note = U/M: U (0.38:0.89) in Skeletal Muscle cells
  misc_feature 1..171: note = source = chr15:43566080-43566250; Gene: TGM5 (Intergenic)
  source 1..171: mol_type = genomic DNA
cgtgtagctgggattacaggtgccgccaccacacccagctactttttgtatttttagtagagatggggtttcaccatgttggctgggctggtctcgaactcctgacctcaggtgatcagcttgcctcagcctcccagtgtgctgggattacaggcgtgagccaccatgctc

SEQ ID NO: 4935 - DNA, 232 bp, Homo sapiens
  misc_feature 1..232: note = U/M: U (0.36:0.87) in Skeletal Muscle cells
  misc_feature 1..232: note = source = chr6:117596420-117596651; Gene: VGLL2 (Intergenic)
  source 1..232: mol_type = genomic DNA
cgttaacactcacaagatctgtgatcagaacccacagggaacattttcccacccacaaggttctgattactgaaacttctctcctaagctacatctgacctgaatatcaggttgctggtaaggagactcattcactggaattggcctttggggcggtcctgaacagaccgtccagactgctgagccagtccaggctccagcgacctggcacgtatgacacgcgaaccacagc

SEQ ID NO: 4936 - DNA, 38 bp, Homo sapiens
  misc_feature 1..38: note = U/M: U (0.3:0.79) in Skeletal Muscle cells
  misc_feature 1..38: note = source = chr20:55876271-55876308; Gene: MIR4325 (Intergenic)
  source 1..38: mol_type = genomic DNA
cgcacgcatcgtgttacagcctcgcgttcaggccctgc

SEQ ID NO: 4937 - DNA, 108 bp, Homo sapiens
  misc_feature 1..108: note = U/M: U (0.39:0.84) in Skeletal Muscle cells
  misc_feature 1..108: note = source = chr9:140031521-140031628; Gene: GRIN1 (Intergenic)
  source 1..108: mol_type = genomic DNA
cgctcacaggaggagctgtggcctggagacgcggcctccaccccatctccatcatggacaacctgccaaggggtcttgaacagaagcttggggacgcacatacggtcc

SEQ ID NO: 4938 - DNA, 44 bp, Homo sapiens
  misc_feature 1..44: note = U/M: U (0.2:0.85) in Skeletal Muscle cells
  misc_feature 1..44: note = source = chr11:107584376-107584419; Gene: SLN (Intergenic)
  source 1..44: mol_type = genomic DNA
cgtgatctcagctcactgcaacctccgcctcccgggttcgagcg

SEQ ID NO: 4939 - DNA, 132 bp, Homo sapiens
  misc_feature 1..132: note = U/M: U (0.31:0.93) in Skeletal Muscle cells
  misc_feature 1..132: note = source = chr12:131173467-131173598; Gene: STX2 (Intergenic)
  source 1..132: mol_type = genomic DNA
cgaaggtcggtcgcaggcagcagagaactgcccagtgtgcgccgatatcctctgtcccttttcatttctgaaaagcgccggttacagcccacaaaattgatttcatggctccctaatgggctatgacctgcg

SEQ ID NO: 4940 - DNA, 149 bp, Homo sapiens
  misc_feature 1..149: note = U/M: U (0.23:0.85) in Skeletal Muscle cells
  misc_feature 1..149: note = source = chr17:27967189-27967337; Gene: SSH2 (intron)
  source 1..149: mol_type = genomic DNA
cgggttcacgccattctcctgcctcagcctcctgagtagctgggactacaggcacccgccaccacgcctggctatttttgtatttttagtagagacggggtttcaccgtgttagccaggatggtctccatctcctgacctcgtgatccg

SEQ ID NO: 4941 - DNA, 235 bp, Homo sapiens
  misc_feature 1..235: note = U/M: U (0.26:0.88) in Skeletal Muscle cells
  misc_feature 1..235: note = source = chr19:45619325-45619559; Gene: PPP1R37 (intron)
  source 1..235: mol_type = genomic DNA
cgctttcatccaagcctgccattgaccttacatgcagctgctgtgtgtgaggcgctgtggcatgagggaaggtgcgcccaatctgccttgttccttccgtcccaagagacttggaaagccatgagtgtgttctgaccgcatctgtttctgtaacaggatcttcagctgcggcaggcagttgggaaggtcaggacgaggggaagggaaggcaggcctgtggcacctgccatctgcg

SEQ ID NO: 4942 - DNA, 109 bp, Homo sapiens
  misc_feature 1..109: note = U/M: U (0.27:0.86) in Skeletal Muscle cells
  misc_feature 1..109: note = source = chr15:64186563-64186671; Gene: HERC1 (Intergenic)
  source 1..109: mol_type = genomic DNA
cgggcgcccaggccgggaccctgggtattttcagcttccagcagcatcagcagggtcagagaggcctcagccatattgtatttcatgtgaccgaggcgcctggccagcg

SEQ ID NO: 4943 - DNA, 159 bp, Homo sapiens
  misc_feature 1..159: note = U/M: U (0.32:0.91) in Skeletal Muscle cells
  misc_feature 1..159: note = source = chr4:187826071-187826229; Gene: FAT1 (Intergenic)
  source 1..159: mol_type = genomic DNA
cgcgatttatcatctcacagttctgaaggccagaagctcaaaggtgtttggccgggctgcacccgctacagggcctgtagtggagaatccatttgtttctagtttttcgtggcgtctggcttccttagctagtgccacattgctccaatctctgctccg

SEQ ID NO: 4944 - DNA, 354 bp, Homo sapiens
  misc_feature 1..354: note = U/M: U (0.3:0.89) in Skeletal Muscle cells
  misc_feature 1..354: note = source = chr18:57863480-57863833; Gene: MC4R (Intergenic)
  source 1..354: mol_type = genomic DNA
cggcttcccaaagtgctgggattacaggcatgagccactgtgcccggcccaagacctagatattaaaacaaaacaaaacaaaacacacaaaaaaactgtgttcccagtcacatgccctcagactcctcacagccagcgatggaagtgagaccccccccagtaacagagggggtggcgactgctgtggccactggatttcagcctctttccagcagcgactctaagaagcgcagcgaaactcaaccgtatccaatccagttagttactggcccagaattatagcttccacctgcaccttctagccaccatggcaacctcctctgaagaagttttgctgattgtaaagaaagtgcg

SEQ ID NO: 4945 - DNA, 24 bp, Homo sapiens
  misc_feature 1..24: note = U/M: U (0.3:0.88) in Skeletal Muscle cells
  misc_feature 1..24: note = source = chr15:61916249-61916272; Gene: VPS13C (Intergenic)
  source 1..24: mol_type = genomic DNA
cgggaaacggtgccgagacgagcg

SEQ ID NO: 4946 - DNA, 180 bp, Homo sapiens
  misc_feature 1..180: note = U/M: U (0.31:0.89) in Skeletal Muscle cells
  misc_feature 1..180: note = source = chr15:42652008-42652187; Gene: CAPN3 (exon)
  source 1..180: mol_type = genomic DNA
cgaccgtcattagcgcatctgtggctccaaggacagcggctgagccccggtccccagggccagttcctcacccggcccagagcaaggccactgaggctgggggtggaaacccaagtggcatctattcagccatcatcagccgcaattttcctattatcggagtgaaagagaagacattcg

SEQ ID NO: 4947 - DNA, 49 bp, Homo sapiens
  misc_feature 1..49: note = U/M: U (0.36:0.93) in Skeletal Muscle cells
  misc_feature 1..49: note = source = chr2:232553513-232553561; Gene: PTMA (Intergenic)
  source 1..49: mol_type = genomic DNA
cggtacacgccgctcggcagggctgcggtgtacttaggtacatgggccg

SEQ ID NO: 4948 - DNA, 94 bp, Homo sapiens
  misc_feature 1..94: note = U/M: U (0.34:0.91) in Skeletal Muscle cells
  misc_feature 1..94: note = source = chr6:33697559-33697652; Gene: IP6K3 (intron)
  source 1..94: mol_type = genomic DNA
cggctcactgcaacctccgcctcccgggttcaagcagttctcttgcctcagccttccgagtagcttggattacaggtgcccgccactgcacccg

SEQ ID NO: 4949 - DNA, 122 bp, Homo sapiens
  misc_feature 1..122: note = U/M: U (0.33:0.9) in Skeletal Muscle cells
  misc_feature 1..122: note = source = chr13:106744204-106744325; Gene: LINC00460 (Intergenic)
  source 1..122: mol_type = genomic DNA
cgtcttttcttttgcgtaatgatgagcagctgttctctaagatggcctcattgcctgggaccgctgcgaaggacagctctggactcctaaaatcaggcgttaagttgtctgaaggttcaacg

SEQ ID NO: 4950 - DNA, 177 bp, Homo sapiens
  misc_feature 1..177: note = U/M: U (0.31:0.88) in Skeletal Muscle cells
  misc_feature 1..177: note = source = chr2:234984056-234984232; Gene: SPP2 (intron)
  source 1..177: mol_type = genomic DNA
cgtcaccgccctgctctgtagccacttcactgctgtcctatccccatgtccaccccttctcctcctggacctcacggccgcgttggatgtgggtgaccactccttctttcttgaaaccctctgacctctgagatttggtcccctctcaggccaagacttcttactcttcacagaccg

SEQ ID NO: 4951 - DNA, 274 bp, Homo sapiens
  misc_feature 1..274: note = U/M: U (0.34:0.91) in Skeletal Muscle cells
  misc_feature 1..274: note = source = chr16:78936064-78936337; Gene: WWOX (intron)
  source 1..274: mol_type = genomic DNA
cgggcagcctgcagctgatccggtggtgtctgaaaccatcctgtgtgctgtagtgtcaacaacttagcctggttactttgccaccaaaccccaccaaatgcctttgtatctttttcagaactgcatctctgcagcataattgatattacaggaatgaaaagtgttctgaggcatattattcccagggtaaagagtcaccgctgattaattacctcaaggacaaggggacggtgactttttctcttgtatccagcagcgccacgcggggcgggcg

SEQ ID NO: 4952 - DNA, 65 bp, Homo sapiens
  misc_feature 1..65: note = U/M: U (0.33:0.89) in Skeletal Muscle cells
  misc_feature 1..65: note = source = chr3:187724991-187725055; Gene: LPP-AS2 (Intergenic)
  source 1..65: mol_type = genomic DNA
cgcacggtacctcatgacaattaagtcccacagagtagtcggcgctcttgtcatactgtgtgtcg

SEQ ID NO: 4953 - DNA, 148 bp, Homo sapiens
  misc_feature 1..148: note = U/M: U (0.34:0.9) in Skeletal Muscle cells
  misc_feature 1..148: note = source = chr15:41215757-41215904; Gene: DLL4 (Intergenic)
  source 1..148: mol_type = genomic DNA
cgggggctctgggaaagttgctgcggaggctgccctaaaccctggcctgctccgtggctggaaatacccactgcgtggctcctggccctagctttccaggcattccctgggtttggcaaatgaagctggggcagctgccgggtcaccg

SEQ ID NO: 4954 - DNA, 183 bp, Homo sapiens
  misc_feature 1..183: note = U/M: U (0.27:0.83) in Skeletal Muscle cells
  misc_feature 1..183: note = source = chr2:177833296-177833478; Gene: HNRNPA3 (Intergenic)
  source 1..183: mol_type = genomic DNA
cgggcaggtggcaggtttggcatctattatgaaatctagagacgcctattgctatcgcaccacatgggggtggtttgcaggcgtccctgtccttcagcatcttagggtcagttctagtatgtgaaaaatgttctgctcagtccccagggttccatgatataaggcacaccaggaatcatttcg

SEQ ID NO: 4955 - DNA, 205 bp, Homo sapiens
  misc_feature 1..205: note = U/M: U (0.31:0.87) in Skeletal Muscle cells
  misc_feature 1..205: note = source = chr10:69881845-69882049; Gene: MYPN (exon)
  source 1..205: mol_type = genomic DNA
cggataccagggataatgaagtgaatcacgccctggaacagcaggaagccaagaggcgtgaagcggagcaggctgccagtgaggcggctggtggagacactacaccagggtcttccccttcatctctgtactatgaagaacctctggggcaacctccccggttcactcaaaagttacggagcagagaagttccagaaggaactcg

SEQ ID NO: 4956 - DNA, 276 bp, Homo sapiens
  misc_feature 1..276: note = U/M: U (0.34:0.9) in Skeletal Muscle cells
  misc_feature 1..276: note = source = chr12:47086666-47086941; Gene: SLC38A4 (Intergenic)
  source 1..276: mol_type = genomic DNA
cgccgtatatccttgcagttccaacactagctatattcccaagagaactgaaaacatatgtccacacaaatcttgtacaggagtgttcatattaatagcagccttagttatggcagccaaaaggtggagacaacccaaatgcccattaagtgatgaataaataaataaaatgtactacgtttatgtgatggagtattatattccataagtgaaatgaagtactgatacatgctacgacatggatgcaccttgaaaacattatgccaagtgaaggcg

SEQ ID NO: 4957 - DNA, 159 bp, Homo sapiens
  misc_feature 1..159: note = U/M: U (0.3:0.85) in Skeletal Muscle cells
  misc_feature 1..159: note = source = chr3:15540003-15540161; Gene: COLQ (exon)
  source 1..159: mol_type = genomic DNA
cgcacacacaactcacccaagcagcctgccgagtaacagagcagtcctgaaatgatgagcagatgagcgaggctgaatgatgagcccgtcattgtgaggcagggcccaaagcggactggccagggaacactagccggagacaggctgagattcgtcacg

SEQ ID NO: 4958 - DNA, 180 bp, Homo sapiens
  misc_feature 1..180: note = U/M: U (0.36:0.91) in Skeletal Muscle cells
  misc_feature 1..180: note = source = chr11:1993784-1993963; Gene: MRPL23-AS1 (Intergenic)
  source 1..180: mol_type = genomic DNA
cgcagccctcccagacacccagcaaggagcaaaatggccagggcagcaccctctgtttccggagcagctgcagcaaggggtggtcaacctgggggaccagggaccccagacccgcttggagtcctgtgggtggccgcattcccaggaaggctggatccggaggaccggccaacaggatcg

SEQ ID NO: 4959 - DNA, 55 bp, Homo sapiens
  misc_feature 1..55: note = U/M: U (0.38:0.92) in Skeletal Muscle cells
  misc_feature 1..55: note = source = chr18:633846-633900; Gene: CLUL1 (intron)
  source 1..55: mol_type = genomic DNA
cgtgtaatcggaatgaatcagggtggagcgtgtaatcgaaaaaggttgctttacg

SEQ ID NO: 4960 - DNA, 90 bp, Homo sapiens
  misc_feature 1..90: note = U/M: U (0.36:0.9) in Skeletal Muscle cells
  misc_feature 1..90: note = source = chr12:122848458-122848547; Gene: CLIP1 (intron)
  source 1..90: mol_type = genomic DNA
cgcttggtgagactggcctgagcatcgtcacgtacaagagtgacacaagatgttgcacaacgccaaacaaaccttgttccagcaacagcg

SEQ ID NO: 4961 - DNA, 109 bp, Homo sapiens
  misc_feature 1..109: note = U/M: U (0.36:0.9) in Skeletal Muscle cells
  misc_feature 1..109: note = source = chr21:44857515-44857623; Gene: SIK1 (Intergenic)
  source 1..109: mol_type = genomic DNA
cgaggactacaccgggtgctcccaggagctccgagttctcaagagacacctcagctttctcatccccaaaacctccttctctccattcggagcgtctcccctgaacccg

SEQ ID NO: 4962 - DNA, 182 bp, Homo sapiens
  misc_feature 1..182: note = U/M: U (0.36:0.9) in Skeletal Muscle cells
  misc_feature 1..182: note = source = chr17:4528360-4528541; Gene: ALOX15 (Intergenic)
  source 1..182: mol_type = genomic DNA
cgccatacacatcgttttcaatattaaagtcactctttaatttgtaacaaagagatatgggttctagttctgtctttgccaccaattgcctagaaatagctcaaacttgggatctagatttgatctgcccggtttgaatcccgactttgcatctgccatcgatgagccgtgcgtgtcccacg

SEQ ID NO: 4963 - DNA, 195 bp, Homo sapiens
  misc_feature 1..195: note = U/M: U (0.35:0.89) in Skeletal Muscle cells
  misc_feature 1..195: note = source = chr8:144551748-144551942; Gene: ZC3H3 (intron)
  source 1..195: mol_type = genomic DNA
cggcctgggagggcggcctgggagtgcggtggtggcaggaaggaaatggaccttggggctggacatggccgagtgctgccaggcctgagagccaaggggatgaggcggggagggggtgccatctggaggaggagggtctgctccggtgacacagccctgcctgccttttacagacagaggtcacccaggatcacg

SEQ ID NO: 4964 - DNA, 213 bp, Homo sapiens
  misc_feature 1..213: note = U/M: U (0.35:0.89) in Skeletal Muscle cells
  misc_feature 1..213: note = source = chr2:218735522-218735734; Gene: TNS1 (intron)
  source 1..213: mol_type = genomic DNA
cgcagagcagggccagctaagggtccgagggcattgagacaaacccagcgctgctcgacagagaacagtgcaagcaggtggctggcagatactgggtcagtggtgtcatctttttacccgcaaggtcaggcttgccttgtatttgaattctcaagactaattgtgccagtgagtcaggagaggactcccctcttgggggaggcaaaagaaccg

SEQ ID NO: 4965 - DNA, 220 bp, Homo sapiens
  misc_feature 1..220: note = U/M: U (0.31:0.85) in Skeletal Muscle cells
  misc_feature 1..220: note = source = chr19:50347798-50348017; Gene: PTOV1-AS1 (exon)
  source 1..220: mol_type = genomic DNA
cgccgttgcaggcctcttcacagggcaccttgcagttgcaatgtggcatccagcttctctagaaatatgagaagggctgggtgcggtggctcatgcctgtaatcccagcacttttgggaggtcaaggcgggtggatcacctgaggtcaggagtttgagaccagcctggccaacatggtgaaaccctgtctctactaaaaatacaaaatattagctgggcg

SEQ ID NO: 4966 - DNA, 283 bp, Homo sapiens
  misc_feature 1..283: note = U/M: U (0.33:0.87) in Skeletal Muscle cells
  misc_feature 1..283: note = source = chr21:19642209-19642491; Gene: TMPRSS15,TMPRSS15 (exon,intron)
  source 1..283: mol_type = genomic DNA
cgaaacacttaatttccatgctttctagagtagaatgggaaaataatgcgactttcctgtttagtttaagaaatgcgctaatgtagaaaactttgtatccattcggtaaaccttgagaccctggcatacactccggggcgattaggcagggcacacttgtatccaaatgaggtcacaccagcaaggaaccacctgttgttttcttggcacattaatggtcctcctgaatccccctaaagagtgaattgcaaaacaaaattgtagatatgtggtcaattgatcg

SEQ ID NO: 4967 - DNA, 293 bp, Homo sapiens
  misc_feature 1..293: note = U/M: U (0.3:0.84) in Skeletal Muscle cells
  misc_feature 1..293: note = source = chr7:36250051-36250343; Gene: EEPD1 (intron)
  source 1..293: mol_type = genomic DNA
cgagaggattttttttcatgaaagaggataatgatgtctccttcagcttgttccctgcataccttccagagctgtctttttaaaacatgaatcaaatcctggctgcttctgtcatcctgcggctattagaataaacctgagcccttccctgggacctgtgtggcctgcctggctggcctttgacacctcctccctcactctcttgctctcccagctccagctgtcctgccttccctctcctcctagaaaacatcaagcttcttcccacctgcgcatttgctgctgcctccgcg

SEQ ID NO: 4968 - DNA, 330 bp, Homo sapiens
  misc_feature 1..330: note = U/M: U (0.3:0.84) in Skeletal Muscle cells
  misc_feature 1..330: note = source = chr3:84954050-84954379; Gene: LOC440970 (Intergenic)
  source 1..330: mol_type = genomic DNA
cgctgtcttgacgctagctcagtgagggaggcgcagctgggactgccgctccatggagctggcaggagctgggaacaggtggtagccccaccctcttacaagttggaggggtgggagccccgccctcacaggcacagctgcatccgcttagtcttggctgtggatctgtgtatccctgcactttgcggggatgggaggtgcaggaagcccccctgcccccgcagcctcagaagtgcctgttcctgctgcctggtctctccccactcccagtgcccactcccgtttcacagcaaagttgtggctgagctcaggcaccgtcatcacctggcg

SEQ ID NO: 4969 - DNA, 430 bp, Homo sapiens
  misc_feature 1..430: note = U/M: U (0.35:0.89) in Skeletal Muscle cells
  misc_feature 1..430: note = source = chr10:62608802-62609231; Gene: CDK1 (Intergenic)
  source 1..430: mol_type = genomic DNA
cgtgatgctgatgcggctggtccatggaccacactttgagaagtgagggcttaaaagctgggaggcgacacaaaaagggctttgaggggctgagaggagtgcagtttaccttgttgtctgagcacacgaggccggttggggaaggatttcctagtgatagcaaaaatcatttgatcaggttggaagggaagccatctgttttcagccagtagtatttgggaagccctgtggtgtggtggaatagagatcaggattttgagtcacattgacatgagtgtgaatccaaaggagcttggtgtttatcttctaggggacaggaggctttgaagggtttaagtttctcctggtcaacgcattccttagcctgctggctaagggcctcatgcatgcttgagacatagctggaagcttcagtggaaatggcccaccg

SEQ ID NO: 4970 - DNA, 435 bp, Homo sapiens
  misc_feature 1..435: note = U/M: U (0.34:0.88) in Skeletal Muscle cells
  misc_feature 1..435: note = source = chr17:65040029-65040463; Gene: CACNG1 (promoter-TSS)
  source 1..435: mol_type = genomic DNA
cgtggagggatcagagttgggtaaggccagacctgggaaccacctaaaaccttcctatggtttgggggatgccgtggggtttgtggctaaaacgcttgcctaagaggtggactccacaggccctggactgggttcccgggatgtcattagacagaatcctagcccctcagatcccaggatgagaacctactcactgccctgccggtaacaggcttaccccgtgggagcccgggacagccgtgcagcccgcagctcctggtctcctcccctggcctgggctgccctttcccatcagcccagagcaggcagatccccacccccggggccctgctgcccacctctcgccctctcccaactcaggcaccctgagctgctactcacagaggcctcaatctaccatccagagccttctctccttgccaccctgccccgccg

SEQ ID NO: 4971 - DNA, 167 bp, Homo sapiens
  misc_feature 1..167: note = U/M: U (0.34:0.87) in Skeletal Muscle cells
  misc_feature 1..167: note = source = chr4:148927308-148927474; Gene: ARHGAP10 (intron)
  source 1..167: mol_type = genomic DNA
cgtgttaaaagttcagccaccctgggcctgccaagcattgaggaagcccatgctcaccgtgtagagaggctacagagacggggagagatacccggcctgccctagctgttccagctttcctgtccaggcactggacatgtgaagaaacctcttggtcatcccagacg

SEQ ID NO: 4972 - DNA, 68 bp, Homo sapiens
  misc_feature 1..68: note = U/M: U (0.3:0.82) in Skeletal Muscle cells
  misc_feature 1..68: note = source = chr4:6230304-6230371; Gene: LOC285484 (intron)
  source 1..68: mol_type = genomic DNA
cggaggaagagaccgagccaagcatgtaaaggggcatgagagtctctacgtgtgagcgctggtgtgcg

SEQ ID NO: 4973 - DNA, 85 bp, Homo sapiens
  misc_feature 1..85: note = U/M: U (0.36:0.88) in Skeletal Muscle cells
  misc_feature 1..85: note = source = chr7:187369-187453; Gene: FAM20C (Intergenic)
  source 1..85: mol_type = genomic DNA
cgctacttacgcacggcggcctctttctcctgggaagatcagtggcggctccagccaggccagctggcagctcagggctcaggcg

SEQ ID NO: 4974 - DNA, 113 bp, Homo sapiens
  misc_feature 1..113: note = U/M: U (0.34:0.86) in Skeletal Muscle cells
  misc_feature 1..113: note = source = chr2:179632508-179632620; Gene: TTN (exon)
  source 1..113: mol_type = genomic DNA
cggatgcgaacatctctgccttctacaaagagttttgcagttgacacgttgcctcctgccaccactgtgtacttcccagcatcagacatccgggtggatgggatcagaaggcg

SEQ ID NO: 4975 - DNA, 170 bp, Homo sapiens
  misc_feature 1..170: note = U/M: U (0.34:0.86) in Skeletal Muscle cells
  misc_feature 1..170: note = source = chr7:152397270-152397439; Gene: XRCC2 (Intergenic)
  source 1..170: mol_type = genomic DNA
cgcgccttctctcctgcctcggtccaacaagcactgctcatccagcattgctgtgctcctgagaggagaaggcccttttctcccctcctctggaaggaaacggggcagaacaagacaacctcacttcccttgcctctctcgcctcttctgcctctacctaataacctacg

SEQ ID NO: 4976 - DNA, 186 bp, Homo sapiens
  misc_feature 1..186: note = U/M: U (0.3:0.82) in Skeletal Muscle cells
  misc_feature 1..186: note = source = chr3:42726949-42727134; Gene: KLHL40 (promoter-TSS)
  source 1..186: mol_type = genomic DNA
cgtcatgtgcaggaggccaggcggctcgccttacagggacccggccacctctatatatagcccctcgaagacagctgctcagtctaagcaaaccccagcaggaaagcaggggtacagagaggagcccccttggcaccgccaccgcaccctaggccacccaccatggcgctgggcttggagcaggcg

SEQ ID NO: 4977 - DNA, 200 bp, Homo sapiens
  misc_feature 1..200: note = U/M: U (0.32:0.84) in Skeletal Muscle cells
  misc_feature 1..200: note = source = chr2:1690267-1690466; Gene: PXDN (intron)
  source 1..200: mol_type = genomic DNA
cgatccactcaggatggaagaactgtttgctatgaagatttgctcgcccccactgagtgaaacgcttgttggatatgagaacttgctcctttgcaagctctccctacatctgggtgttccctggatacgtccatgtgtttctgcaatgagctgcactgtccttctctgtagagacagacctcctcccaaatctacccacg

SEQ ID NO: 4978 - DNA, 353 bp, Homo sapiens
  misc_feature 1..353: note = U/M: U (0.28:0.8) in Skeletal Muscle cells
  misc_feature 1..353: note = source = chr7:127858051-127858403; Gene: MIR129-1 (Intergenic)
  source 1..353: mol_type = genomic DNA
cgatatgcctccctgaaaggaagaagtggtggaattacagctgccggacagagactgcctgtagccctgaccctgttggatgcccatgggagggtgtcatgtgttgtgcatgtgaatgtcatttatcatctgcaacacagcacttgagaatgactgatggaaacccctgagacatggtcggacatcaaggcactggagactcaggccctggagaaatctgagccagcatcctatgacgcaggtgcaaaccaggaagagtacagaatggagggcctgttcattatgcctgtctcttggtccaaaatgaatgatttcaccataatctgttcatagctggggaaggaaagggggcg

SEQ ID NO: 4979 - DNA, 356 bp, Homo sapiens
  misc_feature 1..356: note = U/M: U (0.27:0.79) in Skeletal Muscle cells
  misc_feature 1..356: note = source = chr12:57644425-57644780; Gene: STAC3 (intron)
  source 1..356: mol_type = genomic DNA
cgtgtgcacacaaggaaggatggactggagacatttgtcctcccctacttttttcttgagccctgggggccctgtgcctagttctgtcccagcctgcctcagggctcagctattttaagttttcagggtaatatgagcctttccttcccttactacttcattcccttcaccccacccccacccccaccccccgcttcaatccaaactcatcctagagtagaataataattttacgcctaaaacccaaaagactcacagacaaggagagaaatgaagaagctgagtagattatagatcagggcagctggggtgagcagtcgtggaaatcaagaggatgaagaggtaacttacgttcg

SEQ ID NO: 4980 - DNA, 495 bp, Homo sapiens
  misc_feature 1..495: note = U/M: U (0.37:0.89) in Skeletal Muscle cells
  misc_feature 1..495: note = source = chr2:85659668-85660162; Gene: SH2D6 (Intergenic)
  source 1..495: mol_type = genomic DNA
cgcccgctaccacgcccggctaattttttgtatttttagtagagacggggtttcaccgtgttagccaggatggtctcgatctcctgacctcgtgatccgcctgcctcggcctcccaaagtgctgggattacaggcgtgagccaccgcgcccggccgaatttttgtatttttagtagagacaagatttcaccatgttggccaggctggcctcgaactcctcacctcaagtgatctgcccgcctcagcctcccaaagtgctgggaattacaggcatgagccactgtgcccagctgctatgattttttgaacagtccaaagtcatttggagccaggcctgccaagtcagttgggaggtcaggaaaggtgacaccatagggctgtgcagagaaccatcaggggatgagaaaagctttctcctggggcttcaaagctggctctgagatgtcctcctcggaggcaccctaaggagactctgctttttcagcctcagtcccg

SEQ ID NO: 4981 - DNA, 158 bp, Homo sapiens
  misc_feature 1..158: note = U/M: U (0.34:0.85) in Skeletal Muscle cells
  misc_feature 1..158: note = source = chr1:196619616-196619773; Gene: CFH (Intergenic)
  source 1..158: mol_type = genomic DNA
cgcccacttgggcttcggaaatcgcagacacccacccctagatgctgctgtgaggccagagcccgaaagcgctcactccggttcccgcaccggtgcatctgtgtgctccccctccccgtaaggggtttgagctgcagggcgacctaactggcaagccg

SEQ ID NO: 4982 - DNA, 215 bp, Homo sapiens
  misc_feature 1..215: note = U/M: U (0.32:0.83) in Skeletal Muscle cells
  misc_feature 1..215: note = source = chr11:119219095-119219309; Gene: C1QTNF5 (Intergenic)
  source 1..215: mol_type = genomic DNA
cgctccgtgacatgtgatatgacattggggtgaatgctgaaggagacgcgagtccagctgccttctattaagccagatgctaaagagatttgcacaaatataaagccacactgccattcttactaattttttttttttgagacggagtttcgctcttgttgcccaggctggagtgcaatggcgagatctcagctcaccacaacctccacctcccg

SEQ ID NO: 4983 - DNA, 362 bp, Homo sapiens
  misc_feature 1..362: note = U/M: U (0.36:0.87) in Skeletal Muscle cells
  misc_feature 1..362: note = source = chr1:199357175-199357536; Gene: LOC100131234 (Intergenic)
  source 1..362: mol_type = genomic DNA
cgttgtggcaatgttgttggtgacagcaaaaatgacccaccaatggaagcagctggcttcactgctcaagtgattatcctgaaccatccaggccaaatccctgttggcagtgcccctgtactggattgtcacacagctcaccttacttgcaagtttgctgaactgaaggaaaagattgattgccattctggtaagaagctggaaaatggccctaaattcttgaaatctggtgatgctgccatttgttgatgaggttcctggcaagccacgcatgttgaggactcctctgactatcctcctctgcgtcctttggctgttcgtaatgcgagatagacagctgccgtggtgtcatccaagtagcg

SEQ ID NO: 4984 - DNA, 233 bp, Homo sapiens
  misc_feature 1..233: note = U/M: U (0.37:0.87) in Skeletal Muscle cells
  misc_feature 1..233: note = source = chr16:87004646-87004878; Gene: C16orf95 (Intergenic)
  source 1..233: mol_type = genomic DNA
cgaatcccatttgacagtcacagacccaagtctacagtcttcgtctccatcaaggagcagaagcaaggtggccctgtggctaagcaagtgcttccaagttccccctgcctgggctgggacgcaacatctgctgcagacaagagcgtgagctttggggaggtgtttaactcctaggagctacatttgctcatctgcagaaggaaagaatcatcgcatttacccccgtgaatgcg

SEQ ID NO: 4985 - DNA, 277 bp, Homo sapiens
  misc_feature 1..277: note = U/M: U (0.35:0.85) in Skeletal Muscle cells
  misc_feature 1..277: note = source = chr1:115727622-115727898; Gene: TSPAN2 (Intergenic)
  source 1..277: mol_type = genomic DNA
cgccaccatccaggcacactggagcctgaggtggacctcccgccctgcttctcccagtatggcagtgtaaggagtggccctcagacagagactagtttcactttcataggtttggtcttcccatctctgtcccaataacaatgactcagtggcagaaaaagtggagtcatttctgaatcccagacacactgccacatgggctcctagttagtggacaatccagggagtagctggcggaccgtgagggagccagctgtgtggctaatgtgggagggcg

SEQ ID NO: 4986 - DNA, 110 bp, Homo sapiens
  misc_feature 1..110: note = U/M: U (0.31:0.8) in Skeletal Muscle cells
  misc_feature 1..110: note = source = chr15:61916027-61916136; Gene: VPS13C (Intergenic)
  source 1..110: mol_type = genomic DNA
cggcgaggggaaagcggagtgcacctgctgcatctcccttcatatcacgttgctgttatgaaaaatagtttgctattttggaaccccctggcagccagagtgaatcgccg

SEQ ID NO: 4987 - DNA, 175 bp, Homo sapiens
  misc_feature 1..175: note = U/M: U (0.35:0.84) in Skeletal Muscle cells
  misc_feature 1..175: note = source = chr22:48977209-48977383; Gene: FAM19A5 (intron)
  source 1..175: mol_type = genomic DNA
cggcatctgtggaaactcatcagtctcccatgttgctgccgtgctgagcacagtgcgagaaagccgtgcggagaatggttttattccccactcggtggtctggaggtgggtggtttttgcccgtctctgggcgcgcggagctgtaggagaggggccactggcgaggccgtgtccg

SEQ ID NO: 4988 - DNA, 190 bp, Homo sapiens
  misc_feature 1..190: note = U/M: U (0.31:0.8) in Skeletal Muscle cells
  misc_feature 1..190: note = source = chr11:61477123-61477312; Gene: DAGLA (intron)
  source 1..190: mol_type = genomic DNA
cggggctgcagcctgtgtgccattggtggtggcaggtgccacctccctctccagtctctgtgggggcaggggatgttggcccttcctgtcacatactagagctctgcagaacctcttcccctggggaaagagctcctgttacgaagtcacttgatccctgcttgcttccgagatgcccggggtacagtcg

SEQ ID NO: 4989 - DNA, 207 bp, Homo sapiens
  misc_feature 1..207: note = U/M: U (0.37:0.86) in Skeletal Muscle cells
  misc_feature 1..207: note = source = chr4:137276273-137276479; Gene: PCDH18 (Intergenic)
  source 1..207: mol_type = genomic DNA
cgctgtctgagcaaatcaattttagtttcttcatggtcctccatctgtcttttaacatgacatttgtccagctgttgaatttataatgcaatagtattttagaccagtttccctctccgtatttcctcacgccagatctcagattcttgtcttcttcccaaagccatgcctgtctttttctagctcgatatttttcaggagttaccg

SEQ ID NO: 4990 - DNA, 324 bp, Homo sapiens
  misc_feature 1..324: note = U/M: U (0.36:0.85) in Skeletal Muscle cells
  misc_feature 1..324: note = source = chr5:31869910-31870233; Gene: PDZD2 (intron)
  source 1..324: mol_type = genomic DNA
cgagctcacagtcttaattcctgctgtcggctcgggcatctgagggcagagagaggggtgggtctgaccccctgtagaaggtggtgatggcgtctgggaggattcgtgccctcacagctgctcaggagcctctccggcgatactctcccaccacccttaaaggcatcataccacaagtgtgcaaattattttttaaaaaagaagagaaagggaagacagaaagccactgaccctgccagctgacctcatcatgttggccatgctgtcctgtgggagaggcacctgtttctgtgttcttgggacccaacactttggattcctccg

SEQ ID NO: 4991 - DNA, 395 bp, Homo sapiens
  misc_feature 1..395: note = U/M: U (0.35:0.84) in Skeletal Muscle cells
  misc_feature 1..395: note = source = chr10:128959870-128960264; Gene: FAM196A (intron)
  source 1..395: mol_type = genomic DNA
cgaacaggggtgagtgttgacacctctccagctgcccggctgccaccttttgagagttctgctggagcagctgttctttacggatcctttggctggctctcccccactctcctcgcctctgctccatttcctctgccagaacacctgtcttgccatgttgtcatggcaggctaatctttctttgttcgccagtcacagaggagatggcaagaaagatctgtgggtacatggaatgatgaatgaaggaacaaatgaaaaaatataattgagaaggtgtctttgtctcagatctatgggggttggattgacccctgttccagagaaacttagcagctttttcctgacagttaagtaaaactctggaaaactgtctcccatgttttctgctcaggacg

SEQ ID NO: 4992 - DNA, 419 bp, Homo sapiens
  misc_feature 1..419: note = U/M: U (0.34:0.83) in Skeletal Muscle cells
  misc_feature 1..419: note = source = chr1:118832980-118833398; Gene: SPAG17 (Intergenic)
  source 1..419: mol_type = genomic DNA
cgcagtgatggggattaacaaaatgcacccatatgcatctctgaaggctgagcatgtgtgtccccagcccaaagtagtcttgggcagttctaggtaggattagcagacttgatttttttattgtctccctttactcctggcaggagagttctgggctagaatcactccaaatttgttttaaggaatttggcacaagcctcttctaaaccgtacaccagaccttgtgttttaccccatcaagtcccttgtggcccttggcaggggcacagcggggaaaggctttccttctctcgatggaaaagagatcattgaactccatgatgcttttaagagaacacagtaacaggtcaggccttagggatgtccccaccaatctctcatgtggtgaaggttccacatgcccgaggaagggaatttcg

SEQ ID NO: 4993 - DNA, 45 bp, Homo sapiens
  misc_feature 1..45: note = U/M: U (0.27:0.75) in Skeletal Muscle cells
  misc_feature 1..45: note = source = chr17:78460515-78460559; Gene: NPTX1 (Intergenic)
  source 1..45: mol_type = genomic DNA
cgtgagctgcagcgcccggactccgcacctattttctgctctgcg

SEQ ID NO: 4994 - DNA, 163 bp, Homo sapiens
  misc_feature 1..163: note = U/M: U (0.34:0.82) in Skeletal Muscle cells
  misc_feature 1..163: note = source = chr19:32808404-32808566; Gene: ZNF507 (Intergenic)
  source 1..163: mol_type = genomic DNA
cgtgagactcgattggctgcgtagcagcaagtatcatttctgtgattcctgtaaaggaatcacacgacgacttccaagtgcatctgcttgctgtgtggatggcctctaatgagacacagtttctagccaattgggtttcacaccgctcagtgccagcttggcg

SEQ ID NO: 4995 - DNA, 171 bp, Homo sapiens
  misc_feature 1..171: note = U/M: U (0.37:0.85) in Skeletal Muscle cells
  misc_feature 1..171: note = source = chr1:53953114-53953284; Gene: DMRTB1 (Intergenic)
  source 1..171: mol_type = genomic DNA
cggacttgcctcttgagagtcagcgtggtaaggttccagtgttcatccttcctgccatcatgcttctggtcactggcaccaagagtgacctggcagtggagggctctggcaccatcctgacgtggccacgccagggtcttgtgcgagtcccttagacttgttgagcctccg

SEQ ID NO: 4996 - DNA, 204 bp, Homo sapiens
  misc_feature 1..204: note = U/M: U (0.36:0.84) in Skeletal Muscle cells
  misc_feature 1..204: note = source = chr2:242152815-242153018; Gene: ANO7 (intron)
  source 1..204: mol_type = genomic DNA
cgtgaacctggtttttcagaaagcaaatggaagttcacctggtggaggatgaagcgttgttgtcacgggggtccctgcaaagcagaccccaagacagagattctggtgcaagtaactgacgtgtgcatcaccccagaagtagtctccactgtgccacagcccctccaagacaccgtagagaagccctcaaaactgttcccgacg

SEQ ID NO: 4997 - DNA, 234 bp, Homo sapiens
  misc_feature 1..234: note = U/M: U (0.36:0.84) in Skeletal Muscle cells
  misc_feature 1..234: note = source = chr2:234242884-234243117; Gene: SAG (intron)
  source 1..234: mol_type = genomic DNA
cgtgagtggaggagccaactctccagccgcagaggctgcttcatgatcctggccatgctgccgtgtgtctgcctggagaaacacacattgctgtgtccccagctggatcccagacccgcctgttggcacagggtctccgccatctgtcagatgttgagaaatctataccccgactgatgatgaagaagatccagtagagaaagagcatgtgctgctttggacccaagctattcg

SEQ ID NO: 4998 - DNA, 428 bp, Homo sapiens
  misc_feature 1..428: note = U/M: U (0.39:0.87) in Skeletal Muscle cells
  misc_feature 1..428: note = source = chr4:187874572-187874999; Gene: FAT1 (Intergenic)
  source 1..428: mol_type = genomic DNA
cgtacattcatatttactgagttatgaaattctagcccatgaaattgcctttctacctggtttgtgtgtttttaaaaatccttaaaaggcttgcatgcattctgtcttctctgaaatacacataattccagtctgtcatataggatttttgtgtgggtttataataatgggtttaatggctaaaaagcataatgcaatgttcatataaataatgaagttggtatatcaaaataaaagtggagagatgctcaaaggctgagttaatgagagaagacaaacacaaaaatctttgactgtcttcaagtacagtaaaatttcagctgtgtcatcactgggggttttcctggatgcggaacagctgtgactgcttcgtgtagcaggtgctggacttcaccggtctctatagtggtagcaaatttgggtcaccg

SEQ ID NO: 4999 - DNA, 148 bp, Homo sapiens
  misc_feature 1..148: note = U/M: U (0.37:0.84) in Skeletal Muscle cells
  misc_feature 1..148: note = source = chr15:27702726-27702873; Gene: GABRG3 (intron)
  source 1..148: mol_type = genomic DNA
cgtatctaaagtggcttggccaggattgatccactgtaccagccctgccctctctaggacgggctgcctccttggagtctgcagcctcacatcagcctagacgcctggtccagccttccttactctgacctgatggttgcagtcgccg

SEQ ID NO: 5000 - DNA, 201 bp, Homo sapiens
  misc_feature 1..201: note = U/M: U (0.35:0.82) in Skeletal Muscle cells
  misc_feature 1..201: note = source = chr15:65698874-65699074; Gene: IGDCC4 (intron)
  source 1..201: mol_type = genomic DNA
cgcagtgtgtttattaactgcacatgtgccacgttacaccaaggcatacggtctccttcaaaccactgggctgagtttatgaatagcatatttgtgcatgcactatatctgggcatgtgtaaaaatacataccttgggcataatcaagttgctgttttagacatttctttattccccccacacaatgtgccgggacatgcg

SEQ ID NO: 5001 - DNA, 283 bp, Homo sapiens
  misc_feature 1..283: note = U/M: U (0.38:0.85) in Skeletal Muscle cells
  misc_feature 1..283: note = source = chr15:87030198-87030480; Gene: AGBL1 (intron)
  source 1..283: mol_type = genomic DNA
cgctggatgcttatcctcttttcatttcagcccataggtgtccaacggtgccgcacgctccttgctataaaactggccaggatctgtagctgcccaatattctcaggttctaaccatcctgccagcccttgggcttgccagctctttttggtttcagtctttcctgaccttccagaactgtcaccggagagcattttataatcaggaataaagggatggcaaagtcaggtcacaaggagatggccacagggtgcagcgttcatccagaaacaagctcagtccg

SEQ ID NO: 5002 - DNA, 421 bp, Homo sapiens
  misc_feature 1..421: note = U/M: U (0.35:0.82) in Skeletal Muscle cells
  misc_feature 1..421: note = source = chr17:13365740-13366160; Gene: HS3ST3A1 (Intergenic)
  source 1..421: mol_type = genomic DNA
cgcatatcctttttgctaagacttgcaattggtcttggtgcttccagacaaagagtcagggtagtcatctcagagctgaaacagttcatgcatcatgtcacccaccccaacattttaccctactgggaaattgttcacctagaaggcattgaggataaatctgggctttgttcattatagttgtggaaaatattagtcgtgaaaccccaaagtcactccaagtgccggtggctgattataaacaaagaggagggcctgagatgggcagagctgagggccaggaccaccatctcaggcctgagctcaggaggggcataaagactcctattgtttgcacggagcctctttgatgctcactcaggaagcccccttcccaaacagtcgcctctgccagtccttggggacctggggaatacgttcg

SEQ ID NO: 5003 - DNA, 233 bp, Homo sapiens
  misc_feature 1..233: note = U/M: U (0.33:0.79) in Skeletal Muscle cells
  misc_feature 1..233: note = source = chr17:17550190-17550422; Gene: RAI1 (Intergenic)
  source 1..233: mol_type = genomic DNA
cgccaacaggcagcccacggtggctcttcagcagggaaatggagtggtcagatttgcacactgggaaggcttctagggcttcgaaggagaagggggatgtgcggggagggaattggaggtgggttcaggggctgagagggggaagggtgatgtgggggtagggataattggaggtgggttcggggactgtgagggggaaggggatgtgagggtggggattggaggtgggttcg

SEQ ID NO: 5004 - DNA, 248 bp, Homo sapiens
  misc_feature 1..248: note = U/M: U (0.38:0.84) in Skeletal Muscle cells
  misc_feature 1..248: note = source = chr13:97912473-97912720; Gene: MBNL2 (intron)
  source 1..248: mol_type = genomic DNA
cgaggtcaaagctctaaggcaggatgtccctggctactgaaggagcagtcaaaggccaggatggttggggggagtcagaaagtatggggccagtcaccgaggtcagtgtaggccgtcagaagactcttgacagtcccgctctgtgaggtggggagccattggaggttcctgggcagaaatgtgacatgatctgattacattttcaaagagtccctcaggatgatttattgagatgtggctgcagtgcg

SEQ ID NO: 5005 - DNA, 310 bp, Homo sapiens
  misc_feature 1..310: note = U/M: U (0.37:0.83) in Skeletal Muscle cells
  misc_feature 1..310: note = source = chr18:47370091-47370400; Gene: MYO5B (intron)
  source 1..310: mol_type = genomic DNA
cgcagccaacaggggcccatggcaagtggaaggctgaggacagggcctagctcccacatgggggcaggaactcctgattcgtgggcaccaccacttccagaaggcaagggctggctccagaattagacaaattgtatgtgcccaaagacagggccagcctgctgagggctagggaggttggaacaatctctggcccatcagttcaggaacaaattacccagccgtgcttgcccagcttcacagccaaatagatcaggcaggccccccttccccaccccggtgctgctgcttggcatgcatctctccagcg

SEQ ID NO: 5006 - DNA, 311 bp, Homo sapiens
  misc_feature 1..311: note = U/M: U (0.37:0.83) in Skeletal Muscle cells
  misc_feature 1..311: note = source = chr8:58130870-58131180; Gene: LOC100507651 (promoter-TSS)
  source 1..311: mol_type = genomic DNA
cgggccaagtagcaacagctgcagtcggcgtgttctctgaaggcagcgtgtgaagggtggaggggttgctcttcttcccaggtgtcttttgaagaggcagtcaagtcagcagctcacagtggccttctggtaacatcgtatgggctgggttacagcacatgccgactgctaagccagtcactggggaaaaccatgtgattgctgtgatgagcttagaatgatcattcctccttcaggagctggggtgggttgagggaacgataaagatcctgataaccttgcatttctccagcgagaaagaagaaattccg

SEQ ID NO: 5007 - DNA, 421 bp, Homo sapiens
  misc_feature 1..421: note = U/M: U (0.38:0.84) in Skeletal Muscle cells
  misc_feature 1..421: note = source = chr10:53061543-53061963; Gene: PRKG1 (intron)
  source 1..421: mol_type = genomic DNA
cggctgccactggacattgcaggtttggcttcctggctattggttttgcagtcagaggagttcagttcagtttagtgtgttgagtatgagcaaagcagtatgagccgtgaggtatcaggatgagtgtgtgactgccttctcttctcatgtgtcatctgtgtgaattcttcccatgtatcagcctcttctaagacgtgaccttaactagtccagttcctggtgctctgacctctctcaagctacttcactcagagtgctgatcaaatggtttggaaccacagtgttagctatgtccttgttccatttagtctgtaaatccactgaggatgtatcttatacttcttttgaaatacactccgccattagcacattgaggagcactactaggggtttaattgacacctgttgattgactggtacg

SEQ ID NO: 5008 - DNA, 193 bp, Homo sapiens
  misc_feature 1..193: note = U/M: U (0.37:0.82) in Skeletal Muscle cells
  misc_feature 1..193: note = source = chr6:169779678-169779870; Gene: THBS2 (Intergenic)
  source 1..193: mol_type = genomic DNA
cgagcagcgccctcaatgctgtggaaaggagccacgccaggggactggccatggggctgccaggaaatccagcagcatcccggggacaggacctcggggagcccacatggcctcatcccacaggcaacagcccatgtgctcctgagcccagctgcctctctccatcaccgtaggttctgggatctcacacacg

SEQ ID NO: 5009 - DNA, 44 bp, Homo sapiens
  misc_feature 1..44: note = U/M: U (0.37:0.81) in Skeletal Muscle cells
  misc_feature 1..44: note = source = chr1:910433-910476; Gene: PLEKHN1 (TTS)
  source 1..44: mol_type = genomic DNA
cgcgcaccacagggcagcacgggagacgttgacaccaccggacg

SEQ ID NO: 5010 - DNA, 279 bp, Homo sapiens
  misc_feature 1..279: note = U/M: U (0.37:0.8) in Skeletal Muscle cells
  misc_feature 1..279: note = source = chr3:195489940-195490218; Gene: MUC4 (intron)
  source 1..279: mol_type = genomic DNA
cgcggcctgaggtgatgccagccgccgtctaccgtgtgctcggcagggccaggcatggttttcggattatgccctttagctcttacaacagcccgtgaggcaggtaatgtcatccccattcttactaggagaaaaccaaattaagtagtttcttcgaagccaagcagctgggaaaccgtggggccagagccctaatccaccatccccaggatttactccgggacagctgcgtggatgggctgtgtcctccctccctcctgcccggcttcccctccttcg

SEQ ID NO: 5011 - DNA, 365 bp, Homo sapiens
  misc_feature 1..365: note = U/M: U (0.39:0.82) in Skeletal Muscle cells
  misc_feature 1..365: note = source = chr2:118892245-118892609; Gene: INSIG2 (Intergenic)
  source 1..365: mol_type = genomic DNA
cgggccatcgagtagtcctcaagccaaagatgtcttcaaaggggcccatgtctgcgggagggggcatgcctcttaatatccctgctgccctcagtcgcttgctggaagcaacagggcaacggtggtgtgaactcaaggatggatcaggaaggcagcagctggagctgtcaatcatacccccagagcaggagatctgagtggtgcctttcataaccacagcatggctgagggggatctgatgccccccaagtagcaggcttcttggctactattcagcttctgtgctggggagaaagatccaaccttcctgtctcctttgggatcccccatcccaaataaggagaatgattggatcttggaagtcg

SEQ ID NO: 5012 - DNA, 471 bp, Homo sapiens
  misc_feature 1..471: note = U/M: U (0.39:0.82) in Skeletal Muscle cells
  misc_feature 1..471: note = source = chr2:219696690-219697160; Gene: PRKAG3 (promoter-TSS)
  source 1..471: mol_type = genomic DNA
cgcaccggataatctgggtacttggtcctcagctgcctcctgggtcactgaggacaagctagagggaccctttttgaggggatgtggcttggagcatgtgggaacatggtcattgagcagagttgggctctcagagtcctgagcccctattccaagagcctccctcatctttatcaggcaccaaagaagggaacatggaggcagatcagcataactttcttccttgttctaatttcagtagagggtggtgctggagttagaaagggcaagttgcagccagctcagaggctggagatgaggcaaggggtttgtgggtagtccaggagagcagctagtgtatgtccagatgtccagatttgagtccctggagtgtgtccctctctcaggtgaaggagatggagtgggtgtttcaggcaggtgaagagctgtgagaatcacctcgaaggcgtggggagcactcagagctccccg

SEQ ID NO: 5013 - DNA, 67 bp, Homo sapiens
  misc_feature 1..67: note = U/M: U (0.36:0.78) in Skeletal Muscle cells
  misc_feature 1..67: note = source = chr18:76517219-76517285; Gene: SALL3 (Intergenic)
  source 1..67: mol_type = genomic DNA
cggatggccagcccccgacacgcctgatccatccgaaaatgtcatccgagactggcagaccagcacg

SEQ ID NO: 5014 - DNA, 174 bp, Homo sapiens
  misc_feature 1..174: note = U/M: U (0.37:0.79) in Skeletal Muscle cells
  misc_feature 1..174: note = source = chr12:3118961-3119134; Gene: TEAD4 (intron)
  source 1..174: mol_type = genomic DNA
cgaggcagtggtcccaggccagcacaccttttctggcagacagtacctctggagagtagcctcgtaattcggccttggcattggggaaaggtcagctggggggtcagcttggccttggccgtgcactctggttacaacccaggtggcaggcagcccactcccctcacctccccg

SEQ ID NO: 5015 - DNA, 137 bp, Homo sapiens
  misc_feature 1..137: note = U/M: U (0.37:0.78) in Skeletal Muscle cells
  misc_feature 1..137: note = source = chr19:4561919-4562055; Gene: SEMA6B (Intergenic)
  source 1..137: mol_type = genomic DNA
cggccaatttttgtatttttagtagggataaggtttcaccatattggccaggctggtcttgaactcctgacctcaggtgatccacccgcctcggcctcccaaagtgctgggattacagttgtgagccacggtgcccg

SEQ ID NO: 5016 - DNA, 150 bp, Homo sapiens
  misc_feature 1..150: note = U/M: U (0.38:0.78) in Skeletal Muscle cells
  misc_feature 1..150: note = source = chr2:3050453-3050602; Gene: TSSC1 (Intergenic)
  source 1..150: mol_type = genomic DNA
cgctcctccaagcaggggctatgggctcacagccagggctcggagggagagggacccctgccctgagctcaccatggagcacgggataggatgggagggacgtgggtgggtaaagggtttgtgcacctgctgtgcaccaggcaggcaccg

SEQ ID NO: 5017 - DNA, 149 bp, Homo sapiens
  misc_feature 1..149: note = U/M: U (0.36:0.87) in Skeletal Muscle cells
  misc_feature 1..149: note = source = chr12:117878550-117878698; Gene: NOS1 (Intergenic)
  source 1..149: mol_type = genomic DNA
cgggactcagcagtgaggagtacacaggttccgcaagtgcacagggttcagatcctggctctgatttgagtctcacaaactgcgtgaccttcagaagtcattttactctctagtctcaatttctcctttctaaaaatgtgctcccgggc

SEQ ID NO: 5018 - DNA, 243 bp, Homo sapiens
  misc_feature 1..243: note = U/M: U (0.34:0.9) in Skeletal Muscle cells
  misc_feature 1..243: note = source = chr6:152664348-152664590; Gene: SYNE1 (intron)
  source 1..243: mol_type = genomic DNA
cgcaatcttggctcactgcaacctccgcctccacctcccaggttcaagcaattttcgtgcttcagcttcctgaatagctaggattacaggcgcctgccaccatgcccagctaatttgtgtatttttagtagagatgaggtttcaccatgttggccaggatggtcttgcactcttgaaactgtgtggtcggcccgccttggcctctcaaagtgttgggattacaggcatgagccactatgcccg

SEQ ID NO: 5019 - DNA, 212 bp, Homo sapiens
  misc_feature 1..212: note = U/M: U (0.36:0.88) in Skeletal Muscle cells
  misc_feature 1..212: note = source = chr5:38046369-38046580; Gene: GDNF (Intergenic)
  source 1..212: mol_type = genomic DNA
cgggcattatgggctgagtggaacactatgtgccctgtgtaaagctatcctttctttggattagtgagctggggcggcctcctttgctatgcactagtctggcctcacaatatctagtttcagaagagcatgattggccagcacgcaggtcagggagaaaaggttctgtgggggtcaccaatgtccttggggagaggggatcgtgcctctcg

SEQ ID NO: 5020 - DNA, 153 bp, Homo sapiens
  misc_feature 1..153: note = U/M: U (0.36:0.85) in Skeletal Muscle cells
  misc_feature 1..153: note = source = chr1:229572271-229572423; Gene: ACTA1 (Intergenic)
  source 1..153: mol_type = genomic DNA
cgcagcggcgccctgctccgccttttgagaactgtcactaagtaaaggtcagccatgtagggtatgcttgacagggagttcctgcttctaagttttcaggtgcagcctcagctcttcataccctgaccgggcccttctgctaccactaccccg

SEQ ID NO: 5021 - DNA, 144 bp, Homo sapiens
  misc_feature 1..144: note = U/M: U (0.36:0.84) in Skeletal Muscle cells
  misc_feature 1..144: note = source = chr4:134357530-134357673; Gene: PCDH10 (Intergenic)
  source 1..144: mol_type = genomic DNA
cgtcagtttaggctgaaaatatccgatacttcccagagtctccttccttgtgtggttttacgtaaaaattggctgtaagagatattcttctgagactgaggagaagatgaaacgaaaaccaccgcattttgaaagtacttatcg

SEQ ID NO: 5022 - DNA, 161 bp, Homo sapiens
  misc_feature 1..161: note = U/M: U (0.37:0.84) in Skeletal Muscle cells
  misc_feature 1..161: note = source = chr1:240689970-240690130; Gene: GREM2 (intron)
  source 1..161: mol_type = genomic DNA
cgtgcttacgtggacgtgtcttcaagagcatctcatagacagacgcacattgttcttttgctgttccaaattacaatgttccaaattacgaaaaaaaaatctgtgctttagtgaaagtccttcaatatttacacgcagcaaaaaatggaatttggatgtcg

SEQ ID NO: 5023 - DNA, 356 bp, Homo sapiens
  misc_feature 1..356: note = U/M: U (0.39:0.85) in Skeletal Muscle cells
  misc_feature 1..356: note = source = chr1:229544900-229545255; Gene: ACTA1 (Intergenic)
  source 1..356: mol_type = genomic DNA
cggagggtactgttctcaacactggctctgactgacgggttctagagggaaatgctcccttttatctcccacccaggaaggagtctgagagcttccatgccccagacttgcccaccatccccaccaccacgtcccctctgaacattccgtgacgctagagacacaggctccaggactttatgatccaccatcagccttgtttttcaaatctactcaatgggaatacgtctagctttcctcctaagcaggcagctcattacatccttggccctggaggaaagttcccttcacccagttcagggtggatacagatgccaggagactcgctgatcagccaccaggccctctctgagccg

SEQ ID NO: 5024 - DNA, 152 bp, Homo sapiens
  misc_feature 1..152: note = U/M: U (0.32:0.92) in Skeletal Muscle cells
  misc_feature 1..152: note = source = chr14:20904169-20904320; Gene: KLHL33 (promoter-TSS)
  source 1..152: mol_type = genomic DNA
cgcggtgcagtgaaacatgcaagaagccctgtaaagatccggtaaccgggaccacacccctcccctattgcccccatccttttagtcaccctcaggagacaccagcgttccgcttgccctctcacttaagcgcccgctgtgcttggggctgc

SEQ ID NO: 5025 - DNA, 116 bp, Homo sapiens
  misc_feature 1..116: note = U/M: U (0.31:0.89) in Skeletal Muscle cells
  misc_feature 1..116: note = source = chr9:84081386-84081501; Gene: TLE1 (Intergenic)
  source 1..116: mol_type = genomic DNA
cgtgactgcattgcagttcaattctccctccgcccggtctcactttcttttcttcccttccacagctgccaatctccacagtacttcttaaatttcatgtgcgttcatttccactc

SEQ ID NO: 5026 - DNA, 286 bp, Homo sapiens
  misc_feature 1..286: note = U/M: U (0.38:0.9) in Skeletal Muscle cells
  misc_feature 1..286: note = source = chr8:58130236-58130521; Gene: LOC100507651 (Intergenic)
  source 1..286: mol_type = genomic DNA
cgctgctcctgtctgaccagccgcccacggtaacacagaaacatctggcaggatggagtggttggcggaagacacatctgacgagatcgaatgttttgcagaagagccatgtgaccagatccctggtttggcagaggagacatgcgagaagacggaacgttttggccgaggagacatctggcagggtggaacggagggaacaggtgtggcagagagaatatctgagaagctcgcaggattcccagaaggagcactgggagtagattgcctgttttcccgaaggaac

SEQ ID NO: 5027 - DNA, 363 bp, Homo sapiens
  misc_feature 1..363: note = U/M: U (0.32:0.9) in Skeletal Muscle cells
  misc_feature 1..363: note = source = chr14:20903959-20904321; Gene: KLHL33 (promoter-TSS)
  source 1..363: mol_type = genomic DNA
cgagacgctcatgccgaggtttgctggatagctgcaggtgagcagaggcaagacagcctggcgtcagagctgggcccaaagaggccagagcaaccatgtctccagccagttgaaatgtcagtctctcccctgctccaacaccctcctcctaccctcagccacatcccagcactggagtatctgggatatacaggacagctatagggtgcacgcggtgcagtgaaacatgcaagaagccctgtaaagatccggtaaccgggaccacacccctcccctattgcccccatccttttagtcaccctcaggagacaccagcgttccgcttgccctctcacttaagcgcccgctgtgcttggggctgcg

SEQ ID NO: 5028 - DNA, 316 bp, Homo sapiens
  misc_feature 1..316: note = U/M: U (0.28:0.84) in Skeletal Muscle cells
  misc_feature 1..316: note = source = chr14:58410144-58410459; Gene: SLC35F4 (Intergenic)
  source 1..316: mol_type = genomic DNA
cgctttccaaaaagagagaaactttatatcatttgttgtgatatctgtgatttttctagttcatatatttcctttctctcatatagttaatagtctcaccgcatggtgccttagcaaagtacaacgcacacgccagtgagttttctgctcttggttactgccgagtgtcatgatgtaacgggactcttcaccaatctgcgacttcccaccgcctccacacaacccagaggtagacttccccagccccgatgtctgcacggatcatggatgggcccagctgaacttcttctgtaatactattcgattcagttaaccg

SEQ ID NO: 5029 - DNA, 184 bp, Homo sapiens
  misc_feature 1..184: note = U/M: U (0.35:0.89) in Skeletal Muscle cells
  misc_feature 1..184: note = source = chr6:36336696-36336879; Gene: ETV7 (exon)
  source 1..184: mol_type = genomic DNA
cgaggctcaccttgtgatttccccagagtctggcgagcccatttggatccacaactcggaagatcttggcgtccttgtcttcccacttgatgtagggctcatatcgggtatcaaggagcagctgatacacgtaatcccacagcaggcggcagtctgcaatttagcacagggagtgcaggcagcg

SEQ ID NO: 5030 - DNA, 348 bp, Homo sapiens
  misc_feature 1..348: note = U/M: U (0.35:0.89) in Skeletal Muscle cells
  misc_feature 1..348: note = source = chr9:74426982-74427329; Gene: TMEM2 (Intergenic)
  source 1..348: mol_type = genomic DNA
cgcctcagcctcccaaattgctgggattacaggcatgagccactgtgcccagccacaaatatcatttttaaagctgtaaagagtatataacaaaaatgccacaacgattctccctgaatggtaatatgatgaagagtatttatttccttctctgtatttttctgtactttctaaatattctacaataaatatgtactatttttgtaattaagaaaaagttatttcttttttttttaagccagactcttctcagttgattgtccaaatgggataagggcgtatatttaagagaaaatacgcatcagtgctgcaatgtgttcagagcacgcttactattgcagttgtgcg

SEQ ID NO: 5031 - DNA, 455 bp, Homo sapiens
  misc_feature 1..455: note = U/M: U (0.33:0.87) in Skeletal Muscle cells
  misc_feature 1..455: note = source = chr20:20065420-20065874; Gene: C20orf26 (intron)
  source 1..455: mol_type = genomic DNA
cggctcatttctagctgtggacttagaagacacccatttcccaagtagggtgtcctgaaagggggttgatttccttaaggtgtgtgttcaactccatttcacatggcacagttttcagagtctgatggaaatctgggtgtctgagagattgataagtgtttatgaggtggaccttttgtttcctccagggaagttaaaataaaatattgtataattgatgacgttaacaagcacattgctgccccctccaagacacattcagaatggaagatataaagtaactttgcttttcgctcagagaattgtactatttccgttgcactctgtgctgatctataaactccgcatcttcatcgccactggaacactgtgcggcctgtcagtgccagggcatgtgacgctgcggtgccaaattcacagtggctctccttgcatcctgactttgacaggcagcg

SEQ ID NO: 5032 - DNA, 279 bp, Homo sapiens
  misc_feature 1..279: note = U/M: U (0.35:0.88) in Skeletal Muscle cells
  misc_feature 1..279: note = source = chr6:17296804-17297082; Gene: RBM24 (Intergenic)
  source 1..279: mol_type = genomic DNA
cgtgatccgcccgccttgtcctcccaaagcgctgggattacaggcatgagccactgcacctggcccatattttattttttgtagagacagattctcatgatactgtccagtctggtctcgaactcctggactcaagcaatcctcccactttagaaaccttccaaagtcctgggattatatgcccagccacaaatacatttctaaaaagaaacaaatagaagtttttaatatctaataggaaggagagaatagccgtgacataatgattggtcaggcacg

SEQ ID NO: 5033 - DNA, 100 bp, Homo sapiens
  misc_feature 1..100: note = U/M: U (0.29:0.81) in Skeletal Muscle cells
  misc_feature 1..100: note = source = chr19:5507442-5507541; Gene: ZNRF4 (Intergenic)
  source 1..100: mol_type = genomic DNA
cggcccggcccgggtccaggaactccctggcccggccggcagcgtctccggatcgggtggaggacgagggaatgcggacacggccctgtcttcccctccg

SEQ ID NO: 5034 - DNA, 250 bp, Homo sapiens
  misc_feature 1..250: note = U/M: U (0.29:0.81) in Skeletal Muscle cells
  misc_feature 1..250: note = source = chr5:3489600-3489849; Gene: LOC285577 (intron)
  source 1..250: mol_type = genomic DNA
cggtcaggcctctggtggcccctttgtcaccgccctggaaagagtgcactttctgtcggagctggctttgccaaatgctatcattttaaaagccatgaaagagagggagctgggcctaggggtatacacagccccatatgccggcgacagtgatacaagtgtaattctagactattagagtgacacataagatcatttctgccccggaacatgagacagctgaggggattatgcaggacaggctgtcacg

SEQ ID NO: 5035 - DNA, 92 bp, Homo sapiens
  misc_feature 1..92: note = U/M: U (0.37:0.88) in Skeletal Muscle cells
  misc_feature 1..92: note = source = chr18:76151431-76151522; Gene: SALL3 (Intergenic)
  source 1..92: mol_type = genomic DNA
cggctgtgcagggccgtggtgtggcctgagccgggctgcgtttgtggcttccttcccggcacctgctgtgtcctcggggtcttcggtggccg

SEQ ID NO: 5036 - DNA, 100 bp, Homo sapiens
  misc_feature 1..100: note = U/M: U (0.39:0.87) in Skeletal Muscle cells
  misc_feature 1..100: note = source = chr11:2048934-2049033; Gene: H19 (Intergenic)
  source 1..100: mol_type = genomic DNA
cggatggggactggccggggagatggagctctgggcagcatggactaggcaacatctcgccactgcccacgccagcaccaaggcctgtcctctccaggcg

SEQ ID NO: 5037 - DNA, 113 bp, Homo sapiens
  misc_feature 1..113: note = U/M: U (0.36:0.81) in Skeletal Muscle cells
  misc_feature 1..113: note = source = chr8:58130560-58130672; Gene: LOC100507651 (Intergenic)
  source 1..113: mol_type = genomic DNA
cgggttcaggagcagctcagtgttgctggtggcaagagtgtggtacgagagtggttgggcgtggtttgaatatctagaaaaggcgagctgagggtagatttttgaacagtccg

SEQ ID NO: 5038 - DNA, 249 bp, Homo sapiens
  misc_feature 1..249: note = U/M: U (0.38:0.83) in Skeletal Muscle cells
  misc_feature 1..249: note = source = chr22:18915145-18915393; Gene: PRODH (intron)
  source 1..249: mol_type = genomic DNA
cgctcagcattcccacagctgctgtgttcatcctctgaggtgggcctggcaggagaggctggggaagccagggctgctccctctcctgctctgacacactcagaggcagaacaccataggctaccgctgctcctctccgtgaacttccagagcacagaccaggctgacacagccaagcagtggccaagatgaccacacagcacgtgcagtggccagaggggcagccaggtctcagagtggatggctacg

SEQ ID NO: 5039 - DNA, 302 bp, Homo sapiens
  misc_feature 1..302: note = U/M: U (0.38:0.82) in Skeletal Muscle cells
  misc_feature 1..302: note = source = chr22:39580653-39580954; Gene: CBX7 (Intergenic)
  source 1..302: mol_type = genomic DNA
cgtccgcacgcttcctcccccactacccaccggagcacggctccgtagggatgactcccttgctatgacagggaggctgaggccctgagacaagtgactcacccaaggtcaccgtgaggtggggcaaagccagggtatcagcctgagctctcccaggacccccactccacggcagcagaactgagccatacctgtgcccactcctgcagcaaggtgatggtgacggtgaagctcctgtcaccaccactggggaggccattccagtccctcacggcccccactattggagaggcaggggagcg

SEQ ID NO: 5040 - DNA, 373 bp, Homo sapiens
  misc_feature 1..373: note = U/M: U (0.35:0.79) in Skeletal Muscle cells
  misc_feature 1..373: note = source = chr6:5843289-5843661; Gene: NRN1 (Intergenic)
  source 1..373: mol_type = genomic DNA
cgaaagatgagaagactactgctttttcctcctgtttatttcatgctggtgtggcaaatgggggtgggcaaggtcattccacatggtgtgttggaacaaggacgacagtgaattaagtggctggtggacaacgaggaaagagataaatgggtcaaccagaaaaggacttacagttctgcagttgggcttgtttcataactgggcacatcaatgtgctcaacaagccttagtgggatgaaatttcatctgacaggggactgctgagaaataacaaatgagtggcgggggatttacacgttagataggcaagtatctagagaatcattgttagctcagctaagaaaaatgcctttgctaaatttggggacagccg

SEQ ID NO: 5041 - DNA, 105 bp, Homo sapiens
  misc_feature 1..105: note = U/M: M (0.71:0.17) in Skeletal Muscle cells
  misc_feature 1..105: note = source = chr9:133308491-133308595; Gene: ASS1 (Intergenic)
  source 1..105: mol_type = genomic DNA
cgaaagtccgctggagggaccatgaaagggcaggcctctggcttctctgggcttcagtttgttgaactctaaaacgggctagcgtgggagcctgcagagaaggcg

SEQ ID NO: 5042 - DNA, 115 bp, Homo sapiens
  misc_feature 1..115: note = U/M: M (0.57:0.07) in Skeletal Muscle cells
  misc_feature 1..115: note = source = chr19:39055700-39055814; Gene: RYR1 (exon)
  source 1..115: mol_type = genomic DNA
cgagatgcagatcgccgcgcagatctcggagcccgagggcgagccggagaccgacgaggacgagggcgcgggcgcggcggaggcgggcgcggaaggcgcggaggagggcgcggcg

SEQ ID NO: 5043 - DNA, 23 bp, Homo sapiens
  misc_feature 1..23: note = U/M: M (0.79:0.45) in Skeletal Muscle cells
  misc_feature 1..23: note = source = chr4:89618840-89618862; Gene: NAP1L5 (exon)
  source 1..23: mol_type = genomic DNA
cgctgcctccgccgctgccgccg

SEQ ID NO: 5044 - DNA, 314 bp, Homo sapiens
  misc_feature 1..314: note = U/M: M (0.67:0.15) in Skeletal Muscle cells
  misc_feature 1..314: note = source = chr2:223153657-223153970; Gene: PAX3 (intron)
  source 1..314: mol_type = genomic DNA
cgcgctcccggccttttaatgtgtaacaatggtatcaacaaacagctacttaatcaatatttggccagagctgctgaaaacttccttttcagattttaattcctacttgtaaaacaaccccagagcagccagtgagataagacattaaactgactgcttaattgccttttagtgtcttgttagttatatatgtacattctaaatggttctttaatctttatttaccctcatagataagttacctgtcatacagaatccaatcgaacgtaaaacattttctgttccagcccaagccaaactctcatttctcaccg

SEQ ID NO: 5045 - DNA, 192 bp, Homo sapiens
  misc_feature 1..192: note = U/M: M (0.66:0.19) in Skeletal Muscle cells
  misc_feature 1..192: note = source = chr6:100902882-100903073; Gene: SIM1 (intron)
  source 1..192: mol_type = genomic DNA
cgttaaggagcaaatcaccaagaagtacacaatgatgaacactcgccttgtaatatgaggttgggggcagatctttcaaaataaaacatggagttggattttttaaaaggtgttggctaggagctgcttcctaagcaagcaatcaaagccttggtaaggaggaaccgtgagcgccccttaagctcaaatccg

SEQ ID NO: 5046 - DNA, 162 bp, Homo sapiens
  misc_feature 1..162: note = U/M: M (0.72:0.09) in Skeletal Muscle cells
  misc_feature 1..162: note = source = chr2:239072766-239072927; Gene: KLHL30 (Intergenic)
  source 1..162: mol_type = genomic DNA
cggccagtacagggcgcccgtggctggcttctacgctctcgccgccacgctgcacgtgggtgaggcccggggcgtgggaggatcgcccgctctgtcgcccaccccgccgcccgcccgcttgaccacgtcccaccctcccccgcagcgctcggggagccgccg

SEQ ID NO: 5047 - DNA, 189 bp, Homo sapiens
  misc_feature 1..189: note = U/M: M (0.72:0.11) in Skeletal Muscle cells
  misc_feature 1..189: note = source = chr1:119522486-119522674; Gene: TBX15 (intron)
  source 1..189: mol_type = genomic DNA
cgcggagccccaggcgcgagaacaggaactcgggctggcacaccgaggcctcgcagccaagccgcgcctgacccgttcgccgttccggccccgcggcgcctccaaggccgggccgaggggccgaggggccgagggcgggcagacgcggccacggcctaattctgacttctgaaggtcaccgaaactgcg

SEQ ID NO: 5048 - DNA, 297 bp, Homo sapiens
  misc_feature 1..297: note = U/M: M (0.63:0.07) in Skeletal Muscle cells
  misc_feature 1..297: note = source = chr10:102975459-102975755; Gene: LBX1 (Intergenic)
  source 1..297: mol_type = genomic DNA
cgaggcttggcctaaaggcaccatccctgccactcctcaccccctgaattcagtcgggggcctgtgtggagggaaaggaaaacctggagagaccaagtggctgcactgccaccgcgcaggcatggatcctgcctggccgccgtctgggaactcgagatccgaggaggggcaaaagccgccggcgccggggtcaggcctggtggacccgagctccttggtgagacctggacccaccgtcttctccttcaaaagcacagggtggcagcggggaaaggatacgttcccattgaaggggcg

SEQ ID NO: 5049 - DNA, 123 bp, Homo sapiens
  misc_feature 1..123: note = U/M: M (0.64:0.13) in Skeletal Muscle cells
  misc_feature 1..123: note = source = chr13:79181211-79181333; Gene: POU4F1-AS1 (exon)
  source 1..123: mol_type = genomic DNA
cgcactgtctggggtgaacgctcctcacctttgacctgaaccgccaacttcccatcctccacttttggagagcgcgcctgatagctgctgcccacctgggcactgacatcctccttccgaccg

SEQ ID NO: 5050 - DNA, 292 bp, Homo sapiens
  misc_feature 1..292: note = U/M: M (0.63:0.12) in Skeletal Muscle cells
  misc_feature 1..292: note = source = chr19:2251365-2251656; Gene: JSRP1 (TTS)
  source 1..292: mol_type = genomic DNA
cgaccccacgtcggcgccgtgggccacggccctggcgcgccgcgtggctgctgaactgcaagcggcggctgccgagctgcgaagcctcccgggtctgcctccggccacagccccgctgctggcgcgcctgctcgcgctctgcccaggtggccccggcggcctcggcgatcccctgcgagcgctgctgctcctgaaggcgctgcagggcctgcgcgtggagtggcgcgggcgggatccgcgcgggccgggtcgggcacagcgcagcgcgggggccaccgccgccgacgggccg

SEQ ID NO: 5051 - DNA, 348 bp, Homo sapiens
  misc_feature 1..348: note = U/M: M (0.58:0.08) in Skeletal Muscle cells
  misc_feature 1..348: note = source = chr15:68127629-68127976; Gene: SKOR1 (Intergenic)
  source 1..348: mol_type = genomic DNA
cgcacctcctgcttgggctacagacgacgctgcaaattgcagaacactctttgcagggaggagagtgtggatggagtgggagagagctcacggcacagggaatcattcagccttggctttcatttctcgccctcggctggctagtgggggtcccgggttgagcccttcttttatctttcctgggtctccgtttcggcctctatgaaataacacgcaggcctccgtccatgcggctcgtagaaggcgggcggcaggccccgcgccaccggccagcagctcgggaccgggagccctgggctgagggggccgggaagtttcgtggcgggttgtcttggtgggccttggacg

SEQ ID NO: 5052 - DNA, 120 bp, Homo sapiens
  misc_feature 1..120: note = U/M: M (0.58:0.09) in Skeletal Muscle cells
  misc_feature 1..120: note = source = chr10:102983359-102983478; Gene: LBX1 (Intergenic)
  source 1..120: mol_type = genomic DNA
cgggtgctagtccaggcagagtcgggtgctagtccaggcagagtccagtgctagtccgcggcctcaacagagctgtcggctgggctccggaagcccacccggaacctgatggaggcagcg

SEQ ID NO: 5053 - DNA, 321 bp, Homo sapiens
  misc_feature 1..321: note = U/M: M (0.57:0.09) in Skeletal Muscle cells
  misc_feature 1..321: note = source = chr2:223165479-223165799; Gene: CCDC140 (intron)
  source 1..321: mol_type = genomic DNA
cgttttaagccacttctcagcgatagcattttgagagctagactttttccaagttttcttcttcccaaaggttaagcagagtcgacagagcactttctggggtcagcggtaattgctgtgtgaaggaggtaccagaagtgtaatttcaagaaggcaaaagtaggctcaactctcagctaaaataaactcttggaccccgcgagcagttaaagaacatctagagctgagtctcatttgtttttgagccggaggcttggtctccaagccctcccagcgtccacccgtctctctcctgccgggagttttctctcctaagagccg

SEQ ID NO: 5054 - DNA, 380 bp, Homo sapiens
  misc_feature 1..380: note = U/M: M (0.6:0.12) in Skeletal Muscle cells
  misc_feature 1..380: note = source = chr10:102978252-102978631; Gene: LBX1 (Intergenic)
  source 1..380: mol_type = genomic DNA
cgccgcccccttgagcttaaagggtcggcctggctaggggaccaggaggggctgcatggggactgcttgctcccgggagggtgtgggcaggagtctggtgtatatccggccaagaatccctttgcgacgtgtctccatgcctgggtgtgtgtgtatggacctccgtgtgtctgcgtgtgtgtgaccacgtgcggctgagaggccatgtagacgtgacttgggtgtctatgtgtgctccctgcctgtgtgtagttctgtgtctgggtgtacatatgggtagctgagtgtgtctatagacaggcccgagcaggggtctaagtgaacagcaatgtgactgggtaactgtgtctgtggtgtctaagacggtggcttcctgcccg

SEQ ID NO: 5055 - DNA, 58 bp, Homo sapiens
  misc_feature 1..58: note = U/M: M (0.65:0.18) in Skeletal Muscle cells
  misc_feature 1..58: note = source = chr2:223166286-223166343; Gene: CCDC140 (intron)
  source 1..58: mol_type = genomic DNA
cgcccgcacgccgccaaacctaacccggctcagagccgtgactccgcagaacagggcg

SEQ ID NO: 5056 - DNA, 157 bp, Homo sapiens
  misc_feature 1..157: note = U/M: M (0.6:0.13) in Skeletal Muscle cells
  misc_feature 1..157: note = source = chr6:100904161-100904317; Gene: SIM1 (intron)
  source 1..157: mol_type = genomic DNA
cgcctcctgccttcggtgacgcgctctagcacacccaatttcagttggcgagggggtaagctgagatttcgtttctgcacttgacctaccgcagaaaattcgcaaatcctttgattgtctgtttaaaatgaggaggaaaccagctccctttgcggcg

SEQ ID NO: 5057 - DNA, 274 bp, Homo sapiens
  misc_feature 1..274: note = U/M: M (0.54:0.08) in Skeletal Muscle cells
  misc_feature 1..274: note = source = chr10:102982888-102983161; Gene: LBX1 (Intergenic)
  source 1..274: mol_type = genomic DNA
cgccagaagaatgggcgtagggcccacagcccctcacacaacccaggccaagctccctcgtacactcagaccaggagaagaaacagacacgcaatacacaagccccgctcccttggagcctacacttgggcgaacacaccactgctgtttgcagtatcccgagacaggcccggcaggcgtgagctaagaggcctcgggcccgaacttgggatttgaggctctctcacatcgccggtcccagcggcagcgcctgaggcacagccaagaccatccg

SEQ ID NO: 5058 - DNA, 449 bp, Homo sapiens
  misc_feature 1..449: note = U/M: M (0.58:0.12) in Skeletal Muscle cells
  misc_feature 1..449: note = source = chr3:147106635-147107083; Gene: ZIC4 (intron)
  source 1..449: mol_type = genomic DNA
cgcggtggacatctgtaacaagcaaatgaaaaattaaaggcgattagtggccgaccaaacattttgttttatttcattattttagattgagatagaaagcaaaatggggagcttagaaacagaagacaaagaaaaaagtcctacttcaggaagggggactttttaaacattggcagaagcagcaagttccgcaaatgccctctgcaccttagtggtggggttggtgtttcactatgggaaggagttgtttgttgccgactgcccgcgctgggtcaggcagcctctgggccctattgtattaggtgtaggcaggaatttcagtccccctttctcaaggacggattcactaaaggtgtatttggaagactgcattttttatttggagtcatgaaaatagttccactccagttaggatgttatttcatctgatgaaagttgtgggggctgcg

SEQ ID NO: 5059 - DNA, 421 bp, Homo sapiens
  misc_feature 1..421: note = U/M: M (0.53:0.09) in Skeletal Muscle cells
  misc_feature 1..421: note = source = chr6:100903707-100904127; Gene: SIM1 (intron)
  source 1..421: mol_type = genomic DNA
cgaagcggcctcccaaccagaatgatctgaaaatcccccaggctgggctcgggataaatactagttctgaactcccggcgccagcctaggccatttgttgtttcgggtttcggcctcattagtatgcgcctacgagggaaaatgagacttccccacaggttaataaacaacctgtccggcacaggttaacaggagcctctctcgccctctcctgccccacccccgccaccttttaaggaagcttttgccttcccggaggtttgccttctctttctgttccccgtagaaatcttacgattgtgtctgggttaatgttttataagggactggctactctcgtctacctgccgggctttcccgatctaatatcgaaggaacctccccaagtcctagtaaggggtcccccctccctaaagtctcg

SEQ ID NO: 5060 - DNA, 160 bp, Homo sapiens
  misc_feature 1..160: note = U/M: M (0.55:0.12) in Skeletal Muscle cells
  misc_feature 1..160: note = source = chr10:102975233-102975392; Gene: LBX1 (Intergenic)
  source 1..160: mol_type = genomic DNA
cgcccaggaggaaaggggaatggggctgtaaacgtgtctaattcagacccgttatccagatcggaattagtttctcgcggacacctccgcgccgcgggccattctctgcctggggcctttcttggaccgatccatagggcctcgactggcttccacggcg

SEQ ID NO: 5061 - DNA, 100 bp, Homo sapiens
  misc_feature 1..100: note = U/M: M (0.57:0.15) in Skeletal Muscle cells
  misc_feature 1..100: note = source = chr10:102996412-102996511; Gene: FLJ41350 (intron)
  source 1..100: mol_type = genomic DNA
cgcctgctgggaagtgctacctcagctaagccgctcaggtgtcccgagactccgggcaagggaagacaggcggcgagacggagccagaataagggatgcg

SEQ ID NO: 5062 - DNA, 141 bp, Homo sapiens
  misc_feature 1..141: note = U/M: M (0.53:0.13) in Skeletal Muscle cells
  misc_feature 1..141: note = source = chr2:223169338-223169478; Gene: CCDC140 (exon)
  source 1..141: mol_type = genomic DNA
cgtacgtttgggagcgagggacaggagaataattttgatccagaaccttggagattggagaagcaggtggaaaaattctaaaaagatgaaaactgaccatctccgacacagaaacccatcgaaaggggccaccgagacccg

SEQ ID NO: 5063 - DNA, 186 bp, Homo sapiens
  misc_feature 1..186: note = U/M: M (0.54:0.14) in Skeletal Muscle cells
  misc_feature 1..186: note = source = chr11:20229033-20229218; Gene: DBX1 (Intergenic)
  source 1..186: mol_type = genomic DNA
cgcgatctcggctcactgcaccctctgcctcttggtgcaagcgattttcatgtctcagcctcccgagtagctgggattacaggcatttgccaccgcaccaggctaatttttgtattttagtagagacggggattcaccatgttggccaggctggcctcgaactccggacctcagatgatccacccg

SEQ ID NO: 5064 - DNA, 23 bp, Homo sapiens
  misc_feature 1..23: note = U/M: M (0.57:0.18) in Skeletal Muscle cells
  misc_feature 1..23: note = source = chr6:134214113-134214135; Gene: TCF21 (TTS)
  source 1..23: mol_type = genomic DNA
cgcagcccgcggcggccgatgcg

SEQ ID NO: 5065 - DNA, 258 bp, Homo sapiens
  misc_feature 1..258: note = U/M: U (0.15:0.92) in Smooth Muscle cells
  misc_feature 1..258: note = source = chr1:162472870-162473127; Gene: UHMK1 (intron)
  source 1..258: mol_type = genomic DNA
cgctttgatagtttatttctgcctgaaaaccaattgaagactcgttacggagataccctgagtcacctattatacattcatttttgcattaaactacattcttatgtggttacttcggtatttattttttattctttcatctagtagatgttcatagagtgctaggcgctgaaaatgaagaaaaaaatgttcttctccagaagtgtgtaattatgtatattatttcctctgttaagattgtaggctcttgctgggcac

SEQ ID NO: 5066 - DNA, 263 bp, Homo sapiens
  misc_feature 1..263: note = U/M: U (0.14:0.85) in Smooth Muscle cells
  misc_feature 1..263: note = source = chr1:19668409-19668671; Gene: CAPZB (intron)
  source 1..263: mol_type = genomic DNA
cgcagcccctggacctgggctctgcagccccagttggcagggttccaaatgccttctttttacaaacaagtttccctcctactctccagggatgctgcctccttccctacatctggatctgtcacaagctcaagtcatggttcttggccattaccaacaagcaagactattttcctttccattagcgaaacctgtttaaaggaacagctgcagctcgttaggggcggaaggttatgctggttgtggccgagtcggcactgggc

SEQ ID NO: 5067 - DNA, 417 bp, Homo sapiens
  misc_feature 1..417: note = U/M: U (0.2:0.87) in Smooth Muscle cells
  misc_feature 1..417: note = source = chr13:85761481-85761897; Gene: LINC00351 (Intergenic)
  source 1..417: mol_type = genomic DNA
cgatgttattgtaaaagttgagcagtttatccaaaaatctattcccaaatatcaggaaagaatgttggatcgggcgtacgtgaagaatgtggagtgccaaataaaacattctaaacaatccatttcatatgtttaatagaagagaacttaacaatagtaataatgaacatagggttagaatcctgacacgataatgctattttggaatattttggaaatattctcatatattaggatataaattataagtcataaataaagcattttaagtattcagatataatttcttatatagaacaaaacaaattttggcttcactgctagaaaatctgcaaaactcaacattggacaaagataccacaaagaatgaaatgaggcagttcagagaacactggagagcacaaatagttaaaatac

SEQ ID NO: 5068 - DNA, 100 bp, Homo sapiens
  misc_feature 1..100: note = U/M: U (0.22:0.87) in Smooth Muscle cells
  misc_feature 1..100: note = source = chr12:93346409-93346508; Gene: EEA1 (Intergenic)
  source 1..100: mol_type = genomic DNA
cgttttttgcttgcgtcagcagcacatataccaaaattggaacgatacagagaagattagcatggcccctgctcaaggatgacatgcaaattcgtgaagc

SEQ ID NO: 5069 - DNA, 472 bp, Homo sapiens
  misc_feature 1..472: note = U/M: U (0.14:0.78) in Smooth Muscle cells
  misc_feature 1..472: note = source = chr5:105502349-105502820; Gene: RAB9BP1 (Intergenic)
  source 1..472: mol_type = genomic DNA
cggactaatacaaaagtcaaactcgtgttccttgttttaagtctactgtggactctggctgaactgttagggaggcagggcaagagaacagaacacatctaacagaagggccagtaaatgttaacttttttccactgacacagaaaataatgaaattttaaagcagagtaaaatgaaatgtaacaagaagaaaaatgatgtacagtttctaatgaccttctataaactattaaaataataaaatgtagcgaattgttcacaacgtccaaatactttcaacatagagtttattttactaggaggaaatctttttttaacaaattgcattatttagcttgtgaatctccagaggatatgaccaacactcaggtgggggtggggttagtgataatcaagtgctctccatgttgccattctaacattctgaggcatttagccacttttgtaagtacattaacctctcaggccaccc

SEQ ID NO: 5070 - DNA, 225 bp, Homo sapiens
  misc_feature 1..225: note = U/M: U (0.26:0.89) in Smooth Muscle cells
  misc_feature 1..225: note = source = chr5:150054296-150054520; Gene: MYOZ3 (intron)
  source 1..225: mol_type = genomic DNA
cgggcgcagtggctcatgcctgtaatcccactttgggaggccgagggaggcggatcacttgaggtcagaagttcaagaccagcctggccaacatgatgaaatctcatttctactaaaaatacaaaaattagctgggcttcttggcacacacttgtaatcccagctactcaggaggctgaggtgggagaatcgcttgaacctgggaggcggaggttgcagtgtgcc

SEQ ID NO: 5071 - DNA, 277 bp, Homo sapiens
  misc_feature 1..277: note = U/M: U (0.26:0.86) in Smooth Muscle cells
  misc_feature 1..277: note = source = chr17:27924735-27925011; Gene: ANKRD13B (intron)
  source 1..277: mol_type = genomic DNA
cggcactctgggcttgtggggagagctgctctggagcttggctgagtgtatggggttctgcatggggtgtatggggtgctgagccatccaggcctccctggggagtgctcctgaggtgtggggatggggaggagcaccctgcttgcaaggaagtgccagccgctctctggagcctggagctgaggcacctgatggggaggtggaggcagcatctggagccctgaggccaggcagcggcctgccagctccctagggtcttattagctgcagcggctgc

SEQ ID NO: 5072 - DNA, 327 bp, Homo sapiens
  misc_feature 1..327: note = U/M: U (0.29:0.88) in Smooth Muscle cells
  misc_feature 1..327: note = source = chr4:187344569-187344895; Gene: LOC285441 (intron)
  source 1..327: mol_type = genomic DNA
cgtccagcttgttctcctgccacccactcttagcatggaaggacgaagcgggtgacaatcagccaacatgtgctcaaatagctagatgttcgatactgagtagaaaaatccttacacatcagctgagtttttccatgtttacccatatattttggcatagaatgaactaaatctgtgatttttcagcatgttatggttgtagagttcatgaactattattccatcttgggaatactttgagaagtaaaagtaaattttattattgcaaaagatgcagtaatatttagtattttgttttaaaagtcaaaacttactcagcaaatgcac

SEQ ID NO: 5073 - DNA, 66 bp, Homo sapiens
  misc_feature 1..66: note = U/M: U (0.26:0.81) in Smooth Muscle cells
  misc_feature 1..66: note = source = chr1:4329526-4329591; Gene: LOC284661 (Intergenic)
  source 1..66: mol_type = genomic DNA
cgccacactgagaagggcaagaggaaccggcgcggccccactggcggctttattatccagctgatc

SEQ ID NO: 5074 - DNA, 400 bp, Homo sapiens
  misc_feature 1..400: note = U/M: U (0.25:0.8) in Smooth Muscle cells
  misc_feature 1..400: note = source = chr11:41437638-41438037; Gene: LRRC4C (intron)
  source 1..400: mol_type = genomic DNA
cggtattaccatttttcagagagtcatataaagctgttaatttgtttcatttctccgatttgtgagtatgtgtactctataatacagaatctcagaggagaagaggaaaaaatggaacaaccggggcaaataattccatccacccctactcacacttcccaccgttttacatgggagctaggctatttttaagaaccttctctgacagtgaactccaacaaactgttatgttgagtggttcatctatcactataaaccatattatcaatcttaatagtacaatgaagaaattgaggtcaaaagggtaaatgcacaaagtcctaaaacttggttggcaaaaccaagaaaggaacatcaggccttctgacttcagcttttgtgattttcccatcactgaacc

SEQ ID NO: 5075 - DNA, 298 bp, Homo sapiens
  misc_feature 1..298: note = U/M: U (0.25:0.79) in Smooth Muscle cells
  misc_feature 1..298: note = source = chrX:37870948-37871245; Gene: SYTL5 (intron)
  source 1..298: mol_type = genomic DNA
cgtgtacttaactgctgctgctgcccgtggggatattttctagggtatctgtgagtttccatctttgtctttgctaactatttcaaaagttcaggctcaatttttggagttgctatgtttgttttctatttcctattttaactacttcttgttcatttaaatgttctctcaccgtagtttagtgggattttttttttttacttttctctaagcgttagctacaaaaataacttaataggcttttagttcattttcttcttcactgaataagaatattaaaatcaaatttaccttcacc

SEQ ID NO: 5076 - DNA, 192 bp, Homo sapiens
  misc_feature 1..192: note = U/M: U (0.27:0.8) in Smooth Muscle cells
  misc_feature 1..192: note = source = chr2:239618443-239618634; Gene: TWIST2 (Intergenic)
  source 1..192: mol_type = genomic DNA
cgaactcctggcctcaagtgatcgtcctgccccgacctcccaagtagctacgactacaggcacatgccaccatgcccagctaatcatttcccaagtttttgtagtaaacatgtacttatagataattaaagtattgaaaatagtggataggtgtagaggaatttctatcaggagattgttggtgagaatccc

SEQ ID NO: 5077 - DNA, 386 bp, Homo sapiens
  misc_feature 1..386: note = U/M: U (0.34:0.86) in Smooth Muscle cells
  misc_feature 1..386: note = source = chr9:1084974-1085359; Gene: DMRT2 (Intergenic)
  source 1..386: mol_type = genomic DNA
cggcctggatgcccagtcttaatccagcgttccttcttcaaaaccacactgccagaacccactgccaccagagctgggcccacaagggcatcatcatcacctgctacagtgcctggcattcaatgaaggtttgttccattggtaaatgaaactcagggatgctaggatgtcaccggaagagatcctttttcacttagaactgtttcagcttctaagtctttctgaagagtcgatgagcataacattgtgaagtgcttaatgcatgacacaagttattaaacaatttaatatgtgaactgagccaaaaaattttggaatactttaaggaaaattgctaactgatgtatgagaatactgttggaaccctaatcattatcgggtaatcc

SEQ ID NO: 5078 - DNA, 371 bp, Homo sapiens
  misc_feature 1..371: note = U/M: U (0.31:0.81) in Smooth Muscle cells
  misc_feature 1..371: note = source = chr18:18785355-18785725; Gene: GREB1L (Intergenic)
  source 1..371: mol_type = genomic DNA
cgaggtaatgggtgcagcacaccaacatggcacgtgtatacatatgtaacaaacctgcacgttgtgcacatgtactctagaacttaaagtataataaaaaaatttaaaaagacaaaaaaaaaatataatcatcataaaaatccaactaaaaaaaaaagcagcagtccccgttaagaatttccaacaggagtaaagcagaagcaaatagataaattatgaaaagtgagtttaactattgtctggaatatctcctatccttccctgacctcctctttctaccaaccctgttcaagttcagactctcatacctcctccctgggttattgaattaggttctttctcattttcttgccttctttttttctctattc

SEQ ID NO: 5079 - DNA, 136 bp, Homo sapiens
  misc_feature 1..136: note = U/M: U (0.32:0.82) in Smooth Muscle cells
  misc_feature 1..136: note = source = chr9:132085461-132085596; Gene: C9orf106 (TTS)
  source 1..136: mol_type = genomic DNA
cggggtccgtgctggactcagccttgactcggatgcccaccctgagccccacccgagaaagggattatttcatccctgcattatttccttagagctgatggcagaatctgctcatctccaaattcgctgtctcccc

SEQ ID NO: 5080 - DNA, 479 bp, Homo sapiens
  misc_feature 1..479: note = U/M: U (0.33:0.83) in Smooth Muscle cells
  misc_feature 1..479: note = source = chr19:33279635-33280113; Gene: TDRD12 (intron)
  source 1..479: mol_type = genomic DNA
cgtagaggcccagtgagccggtgagggtctctgagtgtgccaagcctgtgggctgtgggtctctctggggagcgagctgctgtgagtacagggacctctgaattccgtccagatgcccaagggaaggcttctcctgtctctggcccctggggctaaagacctgcctgtgtcctgggagctgagtgggaggcacaggctgggtctcactgtcctgtgtgtgcttagcctccttcttttcagttcagcacctctgtttgcagctaggcctacagccccgagtcctgagagttctgctttatcctctccagagaatcagcccctggccttcctcgggttggggtgagtggccgtctggtgtggagtagtgtaaggtgatgcagaggttcccccctctgccacattgctgcagccagggagcctgcccctaattcctaagctttctgaaggttgttctctgcagatagggtcaggcctcccgc

SEQ ID NO: 5081 - DNA, 218 bp, Homo sapiens
  misc_feature 1..218: note = U/M: U (0.34:0.83) in Smooth Muscle cells
  misc_feature 1..218: note = source = chr8:127143317-127143534; Gene: LOC100130231 (Intergenic)
  source 1..218: mol_type = genomic DNA
cggattcaaaaacaaagagcggggatctcatcctccatacatcactgtctaaaaacaagacctcctgtgaggcacttactctctccaggccttttccctctccgataaaaagggactcatttccctgggtttactaattttcagagagatggtgatatctgatagccaaatgatcgtgaaaatgttttgaggagtctgggactattcaatccattgtc

SEQ ID NO: 5082 - DNA, 359 bp, Homo sapiens
  misc_feature 1..359: note = U/M: U (0.3:0.78) in Smooth Muscle cells
  misc_feature 1..359: note = source = chr7:159083175-159083533; Gene: VIPR2 (Intergenic)
  source 1..359: mol_type = genomic DNA
cgcactggggcctgttagggagtgggggctaggggagggacagcattaggagaaatacctaatgtagatgacgggttgatgggtgcagcaaaccaccatggtatttgtatacctatgtaacaaacctgcacgttctgcacgtgtatcccagaacttaagtataatttaaaaaataactaacatgtatagagtggttcctgtgtaccccaaaatggtaccagctgttatgcctaatattttcatctaatatttacaacaagcttttcaagcaagtatcattataatttccctattccagatgaggaaaggaggtgccaagaaaagccttgcctaaagtcccagagttaaatggtagagcc

SEQ ID NO: 5083 - DNA, 183 bp, Homo sapiens
  misc_feature 1..183: note = U/M: U (0.32:0.77) in Smooth Muscle cells
  misc_feature 1..183: note = source = chr16:2249613-2249795; Gene: CASKIN1 (Intergenic)
  source 1..183: mol_type = genomic DNA
cgcagccccttcctctgcccactggctgtgtgtctgctcaggggctccctggtggtcccccaagcccccaaagctctggtatgggcatgaggaacgtgccctcccatgggctggctgctgtggctcctctcattcttgtggcaccgcctctgacagcactgagctggggcccggaccatcacc

SEQ ID NO: 5084 - DNA, 211 bp, Homo sapiens
  misc_feature 1..211: note = U/M: U (0.33:0.78) in Smooth Muscle cells
  misc_feature 1..211: note = source = chr2:241684374-241684584; Gene: KIF1A (intron)
  source 1..211: mol_type = genomic DNA
cgccttaaaggcccctcctctccatcatcctagcagcccagctgccatcactctcctgcctggagttttccagacctctcgggacgttgccggcaccctgtagcccctgtggccctgcctccttcccattcccaacacccaagccagggctgccctggctgagcacccccggccctcagtacaaatcccaggccccactgcacctgcatcc

SEQ ID NO: 5085 - DNA, 320 bp, Homo sapiens
  misc_feature 1..320: note = U/M: U (0.35:0.79) in Smooth Muscle cells
  misc_feature 1..320: note = source = chr2:234106430-234106749; Gene: INPP5D (intron)
  source 1..320: mol_type = genomic DNA
cgtgtctctgtgtcactgagcttgtttttctctcccatcaaaagtgagttccataagaacagagaccatggctgcctcactcacagccatattccctcctcccggcctggggccaggtgcttacgaggccctcagtaatcacggtgttgcatggatagatgaatgaatgaatggatcactgcccaagaggtgaaggagttgaggagagctcgagagagccctagggttatcagaggacactttccttgggctggtgctgaccccgagaagggaagggacccctgagatgtgactccatgtcctccctgcagggcccctcc

SEQ ID NO: 5086 - DNA, 198 bp, Homo sapiens
  misc_feature 1..198: note = U/M: U (0.33:0.77) in Smooth Muscle cells
  misc_feature 1..198: note = source = chr1:42621305-42621502; Gene: GUCA2B (TTS)
  source 1..198: mol_type = genomic DNA
cgcccttcagcccaccaccctggcaggcttccatccccgtccatgctcaagatgggtccctggccaccatggtcatcaccacccttccagggcctgagcagctggatctggtacaaagcaatcggacatagagttggagggggaggcccctgaggcagcccagctcctgaataaagattctacaacacacgagtccac

SEQ ID NO: 5087 - DNA, 176 bp, Homo sapiens
  misc_feature 1..176: note = U/M: U (0.12:0.84) in Smooth Muscle cells
  misc_feature 1..176: note = source = chr15:61264553-61264728; Gene: RORA (intron)
  source 1..176: mol_type = genomic DNA
cgcatgtgtatgtgtgtagctcacgaagcactcccgggagaaactccccaaccaagcatctgtgatactgttggaacaagcacataaactgaccttacaaggtgatgacactgaagcttggaactcactggtatgcataaattctcctgttcgttatgagtatggctgagtgttcg

SEQ ID NO: 5088 - DNA, 320 bp, Homo sapiens
  misc_feature 1..320: note = U/M: U (0.16:0.87) in Smooth Muscle cells
  misc_feature 1..320: note = source = chr1:19668811-19669130; Gene: CAPZB (intron)
  source 1..320: mol_type = genomic DNA
cgctgagcagcggggaggcttatgtggcttctgggatccctgcaccagcatcagaggctcctctgaagcatgggggggtggacggcaggcagatccctgccctggggacagtcaggccggtgcacacaagtggctgctgctggagaggcagcatccgtcccttggcctgggcttcttcagaagcaaaagccaaaaaatcagccgtcttccccacacccagcctccacccagagtggaaagcacacacacgtgataggtgccgtgttacatggggccgaggctacacgggaatgtggctgtgcaccgaccgggagcacacg

SEQ ID NO: 5089 - DNA, 96 bp, Homo sapiens
  misc_feature 1..96: note = U/M: U (0.19:0.85) in Smooth Muscle cells
  misc_feature 1..96: note = source = chr16:60313084-60313179; Gene: LOC644649 (Intergenic)
  source 1..96: mol_type = genomic DNA
cgggtgccgctacggctgcacttcgaatcacttaatttctcaaaatagtgtcagtgaaaactctctatgttgagcacagccatgcaacaaaagccg

SEQ ID NO: 5090 - DNA, 59 bp, Homo sapiens
  misc_feature 1..59: note = U/M: U (0.19:0.84) in Smooth Muscle cells
  misc_feature 1..59: note = source = chr20:59234431-59234489; Gene: MIR4533 (Intergenic)
  source 1..59: mol_type = genomic DNA
cgatcacagacccaccccggcccagcgaggctaactacgtgagcactgggtgagctgcg

SEQ ID NO: 5091 - DNA, 177 bp, Homo sapiens
  misc_feature 1..177: note = U/M: U (0.24:0.88) in Smooth Muscle cells
  misc_feature 1..177: note = source = chr16:79167187-79167363; Gene: WWOX (intron)
  source 1..177: mol_type = genomic DNA
cgtcaatgagacgccacttaacaattttccaccttgccaaatttgaggtccccctcaacattaacggggaacccaatatcagttccttaaatgggagcaaagattgatgtcaatataaactatgacacacattcatattgcagaaagggtaagaaatccttacacagaacgagtacg

SEQ ID NO: 5092 - DNA, 383 bp, Homo sapiens
  misc_feature 1..383: note = U/M: U (0.24:0.88) in Smooth Muscle cells
  misc_feature 1..383: note = source = chr11:117755919-117756301; Gene: FXYD6-FXYD2 (Intergenic)
  source 1..383: mol_type = genomic DNA
cgaggtgagtcaaaggaaaccgagccatggaatatatgagctggatgagacctttgagaatgttttacaaactgggagaccagggcccacagaggggaactgacttgctcagagtcacacagagcttgtcagtggctgagtcaggaccagagcaagatctcctgagtatcggttcagtcccccttcccttgccccatccatcccttgtgatttctgcatcctaaccgaggagtgagaaaacacggaatttcctaaatgtttaaaacattaaaaaatattagctaacctatgtatttgtgagtgctgattattaatgtccccaataaggtgaaactaccaaaggtatccagagtaagagagggatcagaatggggatgggaccg

SEQ ID NO: 5093 - DNA, 439 bp, Homo sapiens
  misc_feature 1..439: note = U/M: U (0.19:0.83) in Smooth Muscle cells
  misc_feature 1..439: note = source = chr15:53729197-53729635; Gene: WDR72 (Intergenic)
  source 1..439: mol_type = genomic DNA
cgctgcccagattcaaggggagagaacatagacctcacctctcagtgggaggagcctctatttcacattgtaggatgagcaaatggaaaaggagatgttgttgcattcaagacaatacaatctgctataatttaccttctggccacagcaattcaaatccctcctatgtgctaaatatattcatgcccccgcttcaaggcctcaagtctcattcccctgaaccatcagcttaaggtccaggatctcatcatctaaatcaggtcctgatgacgtggaggacccttggcttcagatcctggagcactggtctttttgatatgaagccccgtgaactaaatagacaaggatccacatggatagctcatgtctgctccacttggtatcagatagggtagctcccaggctgggggctggaagcatctggagtatcccttactcg

SEQ ID NO: 5094 - DNA, 184 bp, Homo sapiens
  misc_feature 1..184: note = U/M: U (0.21:0.84) in Smooth Muscle cells
  misc_feature 1..184: note = source = chr11:38195199-38195382; Gene: RAG2 (Intergenic)
  source 1..184: mol_type = genomic DNA
cgggattcaggaggatgagagagacctcagattgaaacaggagaatctttattgagcgcagtcaggcccagctgacttacgtccaaaaaattgggcccggaataaagacagcatctggcttttatacacacttcacaaaagtgggtgggctagcttgaagcaagcttaccgtggcgtgaaagcg

SEQ ID NO: 5095 - DNA, 149 bp, Homo sapiens
  misc_feature 1..149: note = U/M: U (0.19:0.81) in Smooth Muscle cells
  misc_feature 1..149: note = source = chr1:3999997-4000145; Gene: LOC728716 (promoter-TSS)
  source 1..149: mol_type = genomic DNA
cgggcagctcccagaccaggctcccttcctgctcctgcagactgggaggactgcaggactagctgcacaagacaactggcatttctggggtgcatgcttggtgctgcctcagcacgatgtgaaggctgcgtgtgcaccgtcccatcccg

SEQ ID NO: 5096 - DNA, 214 bp, Homo sapiens
  misc_feature 1..214: note = U/M: U (0.21:0.83) in Smooth Muscle cells
  misc_feature 1..214: note = source = chr18:70791867-70792080; Gene: LOC400655 (Intergenic)
  source 1..214: mol_type = genomic DNA
cgtcagctgtttcttctccgggataccttccaaatttgtagactgctgtttgctcctttactatattatggcattattatgctgtctctctccccatcccttacacaaacacacatgcgcgcacagacacacacacttatatatgtatatatacacatatatcaaaaaagtcccacacaatcctcatttcttaatggtacaatgaaagccagcg

SEQ ID NO: 5097 - DNA, 251 bp, Homo sapiens
  misc_feature 1..251: note = U/M: U (0.22:0.84) in Smooth Muscle cells
  misc_feature 1..251: note = source = chr16:4313460-4313710; Gene: TFAP4 (intron)
  source 1..251: mol_type = genomic DNA
cgtctcaggctttgccaccccaggactgaggaagacgtccccactcccttcctaccctcacggccacgcctcccaccacaagccccagccccgctaggctaagacttcacagaagacaagtaccactcactccccaaaaagacaccaagccaacaacccctggggacacggctccccacagcccacccactccaagagatagacccaccctgcgccggagaagcgaggctcccaccatgctgtggggagcg

SEQ ID NO: 5098 - DNA, 156 bp, Homo sapiens
  misc_feature 1..156: note = U/M: U (0.24:0.85) in Smooth Muscle cells
  misc_feature 1..156: note = source = chr21:35231278-35231433; Gene: ITSN1 (intron)
  source 1..156: mol_type = genomic DNA
cgcactccgaatctctcattgcaagagtaggtttcctgggcaccccagagcctgctgttgggtgaattactgtggttgtgaatttccagggctagggcgacgctggctcctgatggtgctggctccatgctggggcgtggggctgccccctctacg

SEQ ID NO: 5099 - DNA, 322 bp, Homo sapiens
  misc_feature 1..322: note = U/M: U (0.24:0.85) in Smooth Muscle cells
  misc_feature 1..322: note = source = chr19:5926434-5926755; Gene: RANBP3 (intron)
  source 1..322: mol_type = genomic DNA
cgcctgtaatcccagatatttgggaggctgaggcaggagaatcgcttgaacccaggaggtggaggttgcagtgagcagagatcatgccactgcactccagcctgggcgacacagcaagacttcgtgtccaaagaaaaaaaaagaatccatggctcaagtttgccctggaaggagaggctgggatttgactgagactgcgaagtgcacgtaagcctctgacttctgcaagaagccaaccccaccaaattcaaagcagctgtctccccagactcaaggcagagattccacagggcctgaactccacaggccaagcccttccccg

SEQ ID NO: 5100 - DNA, 147 bp, Homo sapiens
  misc_feature 1..147: note = U/M: U (0.19:0.79) in Smooth Muscle cells
  misc_feature 1..147: note = source = chr9:135414930-135415076; Gene: C9orf171 (intron)
  source 1..147: mol_type = genomic DNA
cggaaaagcctggggctcagcaacagcgcctatgatgttctagggccaaccaggggatcggaggagtctttctcgaaatcctggtaccctcaggaggggccaggaggggtgcacgaagtgggaggctgaggatttccaggcgtggcg

SEQ ID NO: 5101 - DNA, 440 bp, Homo sapiens
  misc_feature 1..440: note = U/M: U (0.26:0.86) in Smooth Muscle cells
  misc_feature 1..440: note = source = chr3:56007902-56008341; Gene: ERC2 (intron)
  source 1..440: mol_type = genomic DNA
cgtatgataaaaacagcctaaaaatagcatttaaaatgtagggaagtttagttagtcactttacccaaacattttaattttagaaaactatataaaagtaagatgtctatcagagatgagaagagaaaccaaacaaactgaaaaacaaaacaaggaaagaaatcccactctctctagcagccgggagaactgagaagccagcacagatcctttctatcaggcataccgacaaagtaatctcagcttaaaagtttaaagtttaaaagtttaaggaaaaaaataaaaaacacctaagctctgtaggaggaagatgctacatcttgatggcatgatacctaccctctgacctgacataacgatgaggaaggaacgattccacagtgtgattactagccggacaggggctaatacgtggtttgagttctcagtccttgtcttcg

SEQ ID NO: 5102 - DNA, 201 bp, Homo sapiens
  misc_feature 1..201: note = U/M: U (0.28:0.87) in Smooth Muscle cells
  misc_feature 1..201: note = source = chr16:74303746-74303946; Gene: PSMD7 (Intergenic)
  source 1..201: mol_type = genomic DNA
cgtaaataagaatgaacaagaatctgtattcttccaggcccctctgctgagatggccaatctgaacaggttgctccggagtcctctgtcgcagtcagcatcacagaactttagtgggtaaaacttggtgccttttcttgaaccaatagaggcaagagacagacgtgtggttacttccccactgtcatctctctgcatcccg

SEQ ID NO: 5103 - DNA, 264 bp, Homo sapiens
  misc_feature 1..264: note = U/M: U (0.28:0.87) in Smooth Muscle cells
  misc_feature 1..264: note = source = chr17:60696450-60696713; Gene: MRC2 (Intergenic)
  source 1..264: mol_type = genomic DNA
cgtaagagcgagatgagaccctggggatggagagagggcacggagctgggccttgagagaggagcagagttcactaggctgaggaggggaacatagcagcaaagggtcttagaagcttcacaaacaatgtgtgtcactgcagggcccctatgatctcacacatcctggcctctgccagtgccgttccatcgctttggccgcctgagcatcttggagaactcagcttaggcgtcacctccagccttcctctgggctctcacagcg

SEQ ID NO: 5104 - DNA, 216 bp, Homo sapiens
  misc_feature 1..216: note = U/M: U (0.27:0.85) in Smooth Muscle cells
  misc_feature 1..216: note = source = chr8:286667-286882; Gene: FBXO25 (Intergenic)
  source 1..216: mol_type = genomic DNA
cggattccaaccttgatctgggacttccagcctccaggaggggagacggtaaatgctgtgtttcatgctgcccatctgggtgctttgtttcagtagctcgaacaatcgaatgctctgcccaagtgccagttgggtgatgaagatgacagggctggggagcaagcccagaagaatcgggcctggggaagcaaaggtgagctgggcagctcagggccg

SEQ ID NO: 5105 - DNA, 238 bp, Homo sapiens
  misc_feature 1..238: note = U/M: U (0.26:0.84) in Smooth Muscle cells
  misc_feature 1..238: note = source = chr17:10100002-10100239; Gene: GAS7 (intron)
  source 1..238: mol_type = genomic DNA
cggacagacatccatcagccaaatttccacatcagaatttcctggaaaagggtgaccacccgaagaactcccaaaatacgtatctatcccagggcttcaagctagaaacaaggaggccccttgcttctcatgtaagaagcaatacgttcgctttcttttacatccgaatctcgggaaaggaactggaaaagccagggcagggcacacctgagcctctcctacaagtagggtatctccg

SEQ ID NO: 5106 - DNA, 472 bp, Homo sapiens
  misc_feature 1..472: note = U/M: U (0.29:0.87) in Smooth Muscle cells
  misc_feature 1..472: note = source = chr6:43711267-43711738; Gene: VEGFA (Intergenic)
  source 1..472: mol_type = genomic DNA
cgttgagactctggtcagtctcctctctgcacacagcctccaggagcaagggctagacacagacgggcattcttcccaagtttaattttgaatatgcttaaattattttaaaagcagtcttgccatatcaggaaccccaaattaaactcacacgtatgttcctgcgggatggggagctaaggccttcccactagggcttctccagagcagaagacacagagaggaaaataggctttccaagttggagggcaggacaggttgcataatttgtgggcccagtgaaaaaagaaatatgagtcccacattgtgctgaggagagatctgtggcctgagaggggaagggccctggcctctgctaccctgggaggcaacatcacagccaggaatggggcctgccgctcttactccttaaccagtgctcaccccaggcccagctgtgccaggaaggccttgtttccatcctgggccttcg

SEQ ID NO: 5107 - DNA, 216 bp, Homo sapiens
  misc_feature 1..216: note = U/M: U (0.21:0.78) in Smooth Muscle cells
  misc_feature 1..216: note = source = chr20:3658174-3658389; Gene: ADAM33 (intron)
  source 1..216: mol_type = genomic DNA
cgggtagccatggtcagggcctcctcagagcctctgctacctgaggcttgtttccaaatgagctgctgctcattccctatagaattcaaatttgactcctccacttccaattttggcaaactgctccctcttccaaagttttcctgggcctccagcagcccccgtccctccggctccgacacctgcttcactggacccacgaagtaaacatggacg

SEQ ID NO: 5108 - DNA, 218 bp, Homo sapiens
  misc_feature 1..218: note = U/M: U (0.27:0.84) in Smooth Muscle cells
  misc_feature 1..218: note = source = chr16:79238285-79238502; Gene: WWOX (intron)
  source 1..218: mol_type = genomic DNA
cgtttctttttccttccctcgttaggagtaccctcaccctaaccccagcaaagcatgtctagggtctcacaataatagcaggtctcagaaagataaaataattctgaatgttacaactcgtcccatttaaggctagacataaatctatcacagatcctttggaacatcgatggcaagaattctggaacacgaaggaggtatgaaaagggcttcactcg

SEQ ID NO: 5109 - DNA, 263 bp, Homo sapiens
  misc_feature 1..263: note = U/M: U (0.3:0.87) in Smooth Muscle cells
  misc_feature 1..263: note = source = chr2:691790-692052; Gene: TMEM18 (Intergenic)
  source 1..263: mol_type = genomic DNA
cgcttacagtaaagcacactggctcagaggctgacccagaagcaggctcgctgctctaagcacaaaggcgtgcggtggatttccaaagtcagaatttcaggagcaacgccagacaccagtgtcagcggtctcagccgcactcagaagccagtcgggagaggacggctgccctggccttttccacgccccgcatctctctccagctcagttccaagatcaggacgcagatcaggcggcgcagggccatgcctgcacccgcgccg

SEQ ID NO: 5110 - DNA, 334 bp, Homo sapiens
  misc_feature 1..334: note = U/M: U (0.3:0.87) in Smooth Muscle cells
  misc_feature 1..334: note = source = chr16:29210481-29210814; Gene: SNX29P2 (Intergenic)
  source 1..334: mol_type = genomic DNA
cgtgctgcctgccctggctcccaatgcccagctcacaccaccctgggtagctgaggcttctctggtgcctcccagtccctgtgccttcaacctggtgtccccgatggctgtgaaaggccattgagggaggacattgctgcggggtctgctgctctctcctaggcaccatttcaggagggctcacttgggctcaactcccagaaactgggaatgcagggctctgctgtctgaggccttgctcagcctctgggctcctggattctcggacgtgaagcagctggcgagaatctctggggactgctcgcccctctctgcaggccagggcttcagcacg

SEQ ID NO: 5111 - DNA, 433 bp, Homo sapiens
  misc_feature 1..433: note = U/M: U (0.29:0.86) in Smooth Muscle cells
  misc_feature 1..433: note = source = chrX:68254156-68254588; Gene: PJA1 (Intergenic)
  source 1..433: mol_type = genomic DNA
cgtgcatgtgtgtgtgtgtgtgtgtatgtgtgtgtatctgttagtctgtatatgtgtgtgggtataccaaaccccggggggggccacatgtgtgtatggataagtgtgtatgtgtacactcatgggggtacacagaggccccacaagagcaggggccctatatgtatgtatgtctttgtgaatgtttcttgaaacagtagggagaggaggagaaaagacaaaagccttaaatgactctggcttttggaggagccagcccagtgtggcgggtgtagggagcgggccggccaggggcctgattggaaccagactcagcaaggaggggctgtaaatgttttttgctgcctgtcctgagaaatttatgtcacacccactccatcatcctggcgggggcagcttctcccagctgcctgtggttctgggctttccagcg

SEQ ID NO: 5112 - DNA, 191 bp, Homo sapiens
  misc_feature 1..191: note = U/M: U (0.25:0.81) in Smooth Muscle cells
  misc_feature 1..191: note = source = chr10:134845366-134845556; Gene: GPR123 (Intergenic)
  source 1..191: mol_type = genomic DNA
cggctcctgtggggccccacgaggctcctggctccggttcctgctggctgtccatcctcccggcctggccacatgttcctgctccgatttctctgagcccagctctttctcgccctgggcccgtgtcctggctcatccccctgccaggaatcagcctcccccactcctggtataggggtacagcatggccg

SEQ ID NO: 5113 - DNA, 274 bp, Homo sapiens
  misc_feature 1..274: note = U/M: U (0.27:0.83) in Smooth Muscle cells
  misc_feature 1..274: note = source = chr11:59613940-59614213; Gene: GIF (Intergenic)
  source 1..274: mol_type = genomic DNA
cgctcccatcacacagaacttcttgtgccccttgaacacatcagctacctttgcacatgatgtccccctcagcccaggaccctcttcttttaaatagcctcatggtggcttcctcacatccttcatgtctctgctcagaggtaagcttttagagacgccttcccaggccaccctacataagatcctacatcctcacctccactgacacccctcatgcccctcgcctgctataactcattgccctctgtcgcactaagtgtgtggttgtttatcg

SEQ ID NO: 5114 - DNA, 182 bp, Homo sapiens
  misc_feature 1..182: note = U/M: U (0.29:0.84) in Smooth Muscle cells
  misc_feature 1..182: note = source = chr19:31131014-31131195; Gene: ZNF536 (Intergenic)
  source 1..182: mol_type = genomic DNA
cgtggtggcacgtgcctgtagtcccagctacttgggaggctgaggtggaaggatcacttgaatccgggaggcagaggttgcagtgagccaagatcacgccactgcattccagcctgggcaacagagtgagagtgagaccctgtctcaagaaaaaaaaaattggttatatacacacaaatacg

SEQ ID NO: 5115 - DNA, 319 bp, Homo sapiens
  misc_feature 1..319: note = U/M: U (0.26:0.81) in Smooth Muscle cells
  misc_feature 1..319: note = source = chr2:16266027-16266345; Gene: MYCNOS (Intergenic)
  source 1..319: mol_type = genomic DNA
cgcttcccaccccctaaaggctgcctccagccctgtgcctccaccacagggaccttgcactgctccccggggctgtccctggagccctcctcccctggcctcggccatgcactctgagccactgggtttctctcttggaaggaagcttggcctcttactggccatgaataatagataagcgcttagggaaggggtctggtgaggacactcccctcgttagtgatcctgatatcacccctgaggagccccctctccacgcagcttctgcccccagcacacaggcttgggctgggttgggtgtgggaagcagggtttttcg

SEQ ID NO: 5116 - DNA, 131 bp, Homo sapiens
  misc_feature 1..131: note = U/M: U (0.29:0.83) in Smooth Muscle cells
  misc_feature 1..131: note = source = chr14:97923916-97924046; Gene: LOC100129345 (Intergenic)
  source 1..131: mol_type = genomic DNA
cggataacgttaattgtgccactgtggtggcagtgcaagaaattcctgttcatcccgctgcaatgatgattaaggtaacaaacacccagtcgggaagtcaggctccggccctggagaatagttgaggatcg

SEQ ID NO: 5117 - DNA, 406 bp, Homo sapiens
  misc_feature 1..406: note = U/M: U (0.28:0.82) in Smooth Muscle cells
  misc_feature 1..406: note = source = chr15:26962426-26962831; Gene: GABRB3 (promoter-TSS)
  source 1..406: mol_type = genomic DNA
cgatgacagcccagctctggggacctccatcctatgacagcccagctctggggacctccacccaatgacagcccagctctaatatccacccaacaacagcccagttctaatgacattgctctccagctctgaagctcccagggactggataatgtggaccatgtgtaaagctaagaccacacatcctagcacttcgattacttacccatcaccaaaacagtaacatgctgtgggttccagggaagatgctaccctgaattctccccttgtccaaatcatgccttcccaacaacgctcatccagaactggaactccacattttttaaagacagcccttcagatctgataattggatggaatctctctctccccctggctccctccctcacccatcacacgtaatgcg

SEQ ID NO: 5118 - DNA, 468 bp, Homo sapiens
  misc_feature 1..468: note = U/M: U (0.29:0.83) in Smooth Muscle cells
  misc_feature 1..468: note = source = chr14:104001315-104001782; Gene: TRMT61A (exon)
  source 1..468: mol_type = genomic DNA
cggctgtgatggaggagcagtgctggggctgggcctcagccattcctgtccagccctgtggcccatcccagctgctgtttgttgccaatatgaagtatccactgccacaggctcccctgggtgttgaagccaaagggtgcaggtgggggagtctgaccccctcccaggtgggcctaagcaggaagggggtggaggagggaggggggcattgaccctgagaccacgctgcgtctgacccctgggcccccacggccctggctgccccacggggcctgagaccatctcgtgcttctccagtccccgggccgaggctccagccttggccagaagctggggtgagctgacccagaatccctgccctgctctccccagcgctaggagaccaggccagcccaggaaccagggaggtgaccctgctctctggcctcctggctgatgtcacagcactgagctcagcccaggccttcg

SEQ ID NO: 5119 - DNA, 474 bp, Homo sapiens
  misc_feature 1..474: note = U/M: U (0.29:0.83) in Smooth Muscle cells
  misc_feature 1..474: note = source = chr4:187424572-187425045; Gene: LOC285441 (Intergenic)
  source 1..474: mol_type = genomic DNA
cgtagcagatggctgccagcgttaactgcagcagtgcctcttggtctccagcctgctggcccattctagatgctggacttgctagcctccacagtcttgtgagcaaattcctcaaaatagatctctctctctctctgtacattgtattgcttctgtttctctggagagccttaacacaatgtgtgtgtgtgtgtgtgtgtgtgtgtgcacatgcacatatagagagttttttgaaataatttttaattattttttaatacttttattttagagatggggtctcactgtgttgcccagacgggtctcagatgggctcaagcaatcctcccaccatggcttcccaaagtgctgggattacaggcatgagccactgtgcccagcctaaagagatgtattttaagggaagatctggttctgcagttcaagtctgaaggccacctgctgacagaatccccttttctcagagggcggtcg

SEQ ID NO: 5120 - DNA, 210 bp, Homo sapiens
  misc_feature 1..210: note = U/M: U (0.3:0.83) in Smooth Muscle cells
  misc_feature 1..210: note = source = chr22:43946806-43947015; Gene: EFCAB6 (intron)
  source 1..210: mol_type = genomic DNA
cgaaaggttaattgcaccaaagggtttcaaaagatgtgtcacttccctcacttacagagctcgataagtcaagaaagctggcccctcacgttcgtgactgttggattttttaaagtaggagataagtttttataatgtagataaaccaagtcatgaaatatggagttaagtgtaatttaatatggttgaactgtcctggcgtcttctgcg

SEQ ID NO: 5121 - DNA, 229 bp, Homo sapiens
  misc_feature 1..229: note = U/M: U (0.28:0.81) in Smooth Muscle cells
  misc_feature 1..229: note = source = chr3:53722379-53722607; Gene: CACNA1D (intron)
  source 1..229: mol_type = genomic DNA
cgtgtgcttgctctgtacttacagaggcatgacttctttggtcagtatacttcacgtttccaaatcaaggctttttcttcctaaaattggagcgccccatctctgacttttctcacagagccatcctaataaccaaggagagaaatggatgggaagggcctggataaacgggaagacctttccaagtatgtgggagctccacactggcctggttgtgtcctcctcctcg

SEQ ID NO: 5122 - DNA, 248 bp, Homo sapiens
  misc_feature 1..248: note = U/M: U (0.26:0.79) in Smooth Muscle cells
  misc_feature 1..248: note = source = chr2:1231898-1232145; Gene: SNTG2 (intron)
  source 1..248: mol_type = genomic DNA
cgtgcacactcagccctgtgacctcccagcgtgggatgaagctccactcacgtctgcactttcgagctggcggggggccctcgtggtcatggactgtgaattacccatgttcacatgtgtgcttaaaatgtggctttgacatttacaaaatatggttctcttaggatcagagaacatggactgcaaggccggctctggccctgatccatctggtttctggctgtggttccctgctggggggaggagcg

SEQ ID NO: 5123 - DNA, 377 bp, Homo sapiens
  misc_feature 1..377: note = U/M: U (0.32:0.85) in Smooth Muscle cells
  misc_feature 1..377: note = source = chr12:53458465-53458841; Gene: TENC1 (TTS)
  source 1..377: mol_type = genomic DNA
cgagggccaaagggaggcccagcagcacaacagctcacccgctttccctacagccctacccgctctgtgcaaaccaaggccaacagctcctgctgcctcttcctccctggaaaagtcactgttacggggagggggccaggggttgaaggattagaaggagatagagggcttggtggggaggacacatgtaagtgctagaatcaaacactgaagcgaaacaggcaactggcacaagcagcaagctgaggcatgggacggggcaggaaaaggggagggaggggccacgctgcccctctgggcttgctcagctaaggctctggggtcttgccctcacgctggcagggagacaggccccagagcctcagccccaatacccg

SEQ ID NO: 5124 - DNA, 387 bp, Homo sapiens
  misc_feature 1..387: note = U/M: U (0.25:0.78) in Smooth Muscle cells
  misc_feature 1..387: note = source = chr11:131316805-131317191; Gene: NTM (intron)
  source 1..387: mol_type = genomic DNA
cgatcagaggagaggctgatggaaagcacatacttttaactgttagcctaactgaaaagaatgtcagaaaggaaagatagaaatggaatatgcatatgactgtgttaagacacaccaaagctggaaattatttttgctttgatagtctcctaatttacatgacccaggctaaggctgctgcttattagcatgggtcattgagctgtctgtatctgcagggagatgaatattctcctttagagcaacttccaggctttcaggaattgtatacggggatagaaccacatggttttgcgatggccaagagggctggttggagtgcctcggatgtgattttggacccccaaggttaggggagttacctcctctctgaccttttcctagccg

SEQ ID NO: 5125 - DNA, 424 bp, Homo sapiens
  misc_feature 1..424: note = U/M: U (0.29:0.82) in Smooth Muscle cells
  misc_feature 1..424: note = source = chr7:7011930-7012353; Gene: LOC100131257 (Intergenic)
  source 1..424: mol_type = genomic DNA
cgaaccaatcttgcatcccagggaggaagcccacttgatcatggtcataagctttttgatgtgctgctggattcggtttgccagtattttatagaggatttttgcattgatattcatcggggatattggtctaaaattctcttttttgttgtgtctctgccaggctttggtatcaggatgatgctggcctcataaaatgagttagggaggattccctctttttctattgactggaatagtttcagaaggaatggtaccagctcctccttgtacctctggtagaattcagctgtgaatccgtctgttcctggacttttttttggttggtaagctgttaattattgcctcaatttcagagcctgttattggtctattcagagattcagcttcttcctggtttagtcttgggagggtatatgtgtcg

SEQ ID NO: 5126 - DNA, 113 bp, Homo sapiens
  misc_feature 1..113: note = U/M: U (0.28:0.8) in Smooth Muscle cells
  misc_feature 1..113: note = source = chr20:60441678-60441790; Gene: CDH4 (intron)
  source 1..113: mol_type = genomic DNA
cgatccagaccctttggcaagagggctacaccccagcgttccagcaggtgtgttgggtgtgagacggtcagtgccttctcctcattgtgcctttagatgtttcccggtgagcg

SEQ ID NO: 5127 - DNA, 279 bp, Homo sapiens
  misc_feature 1..279: note = U/M: U (0.28:0.8) in Smooth Muscle cells
  misc_feature 1..279: note = source = chr2:8116225-8116503; Gene: LOC339788 (intron)
  source 1..279: mol_type = genomic DNA
cgttggagagattttcttttgtgcttttagaatagcagagtggaggagaggtcctgggaacaaacactgcaggaggaggtctgtcctgggaatctacatcaacccacactttacgaccaggggaagtgatctcagacttctgggtgtcacgaggaaactggctgagctagattctctctaatattctttctaacactgtagcatcttgtgattattcaagaaaggaaacacgattaaacgtagagcaaaacacagcttaaaaccccatttaccatcacg

SEQ ID NO: 5128 - DNA, 378 bp, Homo sapiens
  misc_feature 1..378: note = U/M: U (0.28:0.8) in Smooth Muscle cells
  misc_feature 1..378: note = source = chr5:298575-298952; Gene: PDCD6 (intron)
  source 1..378: mol_type = genomic DNA
cgggaggcctggcaaactctcctccccagctccgttccaagctctgtggggctccggcaggccccatgtcatgtgcagatgagggattagggttcctcccggcctcgctgctctcaggccctcaagggctcctctcaccacccccgtgcagccagcggaccctgcccccacccagctgctccccccagctgctcccactcagctgctcccactcagctgctcccactcagctgctcccactcagctgctcccacccagctgctcccacccagctgctccccccagctgctcacccccaactgctcccccccagctgctcccccccagctgctcccccagctgctcccccctagctgctcccccccagctgctcccccg

SEQ ID NO: 5129 - DNA, 429 bp, Homo sapiens
  misc_feature 1..429: note = U/M: U (0.32:0.84) in Smooth Muscle cells
  misc_feature 1..429: note = source = chr4:139578057-139578485; Gene: LINC00499 (Intergenic)
  source 1..429: mol_type = genomic DNA
cgcgaatcattcattgctcaagtaaactcctttaaatttaatttggctgaagtttttcttttatcaacatagactcagtgcttagaaggtatataagcactggaaaaactttgtaactttaagttggtctggtgaattatccctggccttctccctatacctggttacagaaataaactcttctttcccagttcatctgcatctcattattggaccatgagaacaagcagcccaaccctcggtttagtctgggaacacttagaggctttaaacattcagcctttttaaaaattttatgtgaatagtatgaggaaaatatgtcaacctactcaaagctttctttaatcgctgctcaattcctagtggacctgagcttccagctgagagttttaattcttctgaggtcccagaagaagtgtacaagatccg

SEQ ID NO: 5130 - DNA, 433 bp, Homo sapiens
  misc_feature 1..433: note = U/M: U (0.26:0.78) in Smooth Muscle cells
  misc_feature 1..433: note = source = chr7:4529910-4530342; Gene: FOXK1 (Intergenic)
  source 1..433: mol_type = genomic DNA
cggtgcacacctgtagtcctggctactctgcaggctgaggcaggaggatggcttgagcccaggagttcaaggctgcagtgagctgtgatcgtgccactgcactccagcctgggctacagagcgagaatttgtctctaaaaattaactctttatgttaaaaactaattttttttaaattaaggtggggtgaagtctcaagaataaatgcattctcttgaagcccagcctccctctgctcccagctttggcttcaacagtttcaccctccttccaaactcctccattacactctgctggtctaaacctgggtaggtttgccaattctgcttcctctgcctagaatcctcttccctcctttatcgtatcttttggccaaacccagctcaaacatcaggttttggaagccttttccatcctgaccacccacaacccg

SEQ ID NO: 5131 - DNA, 453 bp, Homo sapiens
  misc_feature 1..453: note = U/M: U (0.3:0.82) in Smooth Muscle cells
  misc_feature 1..453: note = source = chr1:239071144-239071596; Gene: LOC339535 (Intergenic)
  source 1..453: mol_type = genomic DNA
cgattctcttctctttgcacgggttttggattgcaagcttcaagcctaaacttaactctcttaccatcttactgtcttcagagaacttttattattaaaattccatgtttctgtatcctctagcgcttacccaaatttctgtgctatacagtttgatttcttctttagctttcaatgtaaatgttgcttatttctttcctatttgatgttcttgtgtattttttagaaagttggttgaggtttctgcattgtgtcatcttgttattttattagggattttaactctgagtgtgtgaagagttgacctacaagcagagatcaatgacaaggaggcaagggctgaaagtaaccagctcttctgaaattctgctgcaccaatatatgatactatcatttagcatttaacattctctgcttcgtcacagaatcagatattctttaaaatcagatgcg

SEQ ID NO: 5132 - DNA, 464 bp, Homo sapiens
  misc_feature 1..464: note = U/M: U (0.29:0.81) in Smooth Muscle cells
  misc_feature 1..464: note = source = chr5:3297915-3298378; Gene: LOC285577 (Intergenic)
  source 1..464: mol_type = genomic DNA
cgtaatcctatgtttaagtttttgaggaattaccatatcattttctctctttgatagtttttcttatttttataatttttttgattattcaaaaacttgcagttcttggggtcactttttggctggtttttgcttcgcatgctattttttcccagttttgtttccctttggcttgttttgagtaacagtatgtgttcagcccagtgcacgtccccacagaggagcaagacatgagcttctctgaggtcttgcagctggctcagctctggatacacaagttcacggggaataaaagtgctgccccacatagttttgtgggacaggcttggggtttacttagttttaagagacttttctttaaacaatttctaggtaaatatcatgccaccttggttttttttgtttttgtttttgtttgttttgtttttgttttttctgaagcagtgggtctattttctcttgcg

SEQ ID NO: 5133 - DNA, 90 bp, Homo sapiens
  misc_feature 1..90: note = U/M: U (0.26:0.77) in Smooth Muscle cells
  misc_feature 1..90: note = source = chr12:119858815-119858904; Gene: CCDC60 (intron)
  source 1..90: mol_type = genomic DNA
cgcttctcagtgctgtcttttcagcctcccttccccgctcacccctcgacggagcatcccagctgtttccctgatgtctgtatcagcccg

SEQ ID NO: 5134 - DNA, 311 bp, Homo sapiens
  misc_feature 1..311: note = U/M: U (0.27:0.78) in Smooth Muscle cells
  misc_feature 1..311: note = source = chr18:36480723-36481033; Gene: MIR5583-1 (Intergenic)
  source 1..311: mol_type = genomic DNA
cggcacccatcctttaataagtgttgtgttcgctgccctttttaaaatgattgaattatggctttttatggctctataaaagcctttattaattttggaaagccgctgcatcttctgattctgtccagtccctgccgggaggttaaattattcatgcagattccaattggctacgttgattgtgttctgagaacaacaacatgcagggctctttgttttccatgaaggttgggggcaaggttaggaagaaggcaagaagggtgtgggtatcctaaaaggcattattgcaagggcctcatggggcctccacg

SEQ ID NO: 5135 - DNA, 319 bp, Homo sapiens
  misc_feature 1..319: note = U/M: U (0.29:0.8) in Smooth Muscle cells
  misc_feature 1..319: note = source = chr16:5546289-5546607; Gene: FAM86A (Intergenic)
  source 1..319: mol_type = genomic DNA
cgctggtgtcaagagcctggacattggctggggtcaaggtcccactggcatttggggacctcccttagccctcctgtaccataataagcctttgcctattctctccccatttttacatgcccagctccttctcactattcagcttcatctcgaatgtgtccatctcagagaggccttttccatctgcagtggtctctctagtcacatcttctttcctcatctctcggtcgtactccgtggttatcccacttactcacttgttatcaggcatcatttaggaggaagcttgcttttctctctctcttagtcacagatgtcg

SEQ ID NO: 5136 - DNA, 365 bp, Homo sapiens
  misc_feature 1..365: note = U/M: U (0.33:0.84) in Smooth Muscle cells
  misc_feature 1..365: note = source = chr5:53122510-53122874; Gene: MIR581 (Intergenic)
  source 1..365: mol_type = genomic DNA
cggaaaactgctcccccacctcccagctctgtccaggccttagcctctgcacgctgccccagagcaggtatcagccaggggctggcgctagaccagctcctggagcagtcatccagcctcccgcctctgcactttggaaaagcaactgtcttctatccccatcccattatttagtgtttgggaaggacccaaagttagctaggaggctgtggctttgaatcgctcactgcaaaggtgggttgtagtgttaagagaacagttatgaagcttgtaaatccaaacccccatgaatagttttctggagtattccccagtgtcactctttgctgagactaggggaggaataggggctgcagagagatacg

SEQ ID NO: 5137 - DNA, 389 bp, Homo sapiens
  misc_feature 1..389: note = U/M: U (0.31:0.82) in Smooth Muscle cells
  misc_feature 1..389: note = source = chr2:157516784-157517172; Gene: GPD2 (Intergenic)
  source 1..389: mol_type = genomic DNA
cgattagcttcataaaagtagacattttcatctatcttgttcactgctgtatccgtattccagcacctagaatgtctggcatatggtaagtactcaacaaaaatttgttaaaagaatgtcgaatgaattaagataatgagcccagattctcattttctgagttgctaagttaattctttatttagtgaaagggtgtatattgtcataaattgtttgagttcattctttacctcctccccacactatccttctcccactctatcaattttagcagtaaaatcatgaaataagagagattttgaaagaaaattaaaacatgaaatgcattcacttccttttatttccgggtattttcttctttatatatttttttctttcaatttattacg

SEQ ID NO: 5138 - DNA, 422 bp, Homo sapiens
  misc_feature 1..422: note = U/M: U (0.32:0.83) in Smooth Muscle cells
  misc_feature 1..422: note = source = chr7:4581687-4582108; Gene: FOXK1 (Intergenic)
  source 1..422: mol_type = genomic DNA
cggctatgtctttatcagcatcatgaaaacagactaatacaacccatttgcatttctgtatgaattttagcataattacttgaggaaactctttttttattgagacagagagtcttgccctgttgcccaggctggagtgcagtggtgcaaccgtagctcactgcagcctcaaccttctgggctcaaaccttcctcccatctcggcctcccaagtagcttggactacaggtgcgcaccaccatgcccagctgatttttttctttggcatttgaggaagcatcagagtcacattctggaggagaccttgatcagaaacaatcacctctacaaagtacatcagctcagctaagcagagcagcctctgtccagcagagccaggtaggcctgtcaacctttgtctagggttcaattttaatttcacg

SEQ ID NO: 5139 - DNA, 133 bp, Homo sapiens
  misc_feature 1..133: note = U/M: U (0.3:0.8) in Smooth Muscle cells
  misc_feature 1..133: note = source = chr14:104503689-104503821; Gene: TDRD9 (intron)
  source 1..133: mol_type = genomic DNA
cgggtggcgtctggctgctgcactagaggctgtcctggccccccttgttaaacgcgaagcttgcagtctctgggtaaagtctgttctccctccacatgtgtcactgtcctgtcacaactgattcaactttacg

SEQ ID NO: 5140 - DNA, 219 bp, Homo sapiens
  misc_feature 1..219: note = U/M: U (0.32:0.82) in Smooth Muscle cells
  misc_feature 1..219: note = source = chr2:126895975-126896193; Gene: GYPC (Intergenic)
  source 1..219: mol_type = genomic DNA
cgctccttctaaaaacatgtgtgtttcgtgaaataatttgatgctgctttctgaataaaaagtgactttttattcttggtattctaccaagtttgcatcctgagggaaattaagccgactgttcacatttcgttcatatgtaaattcttgtcaccatacatcgctgttatccacaataatttagcaagcttactagcctctggtcagttgcatcctccg

SEQ ID NO: 5141 - DNA, 226 bp, Homo sapiens
  misc_feature 1..226: note = U/M: U (0.24:0.74) in Smooth Muscle cells
  misc_feature 1..226: note = source = chr6:170409103-170409328; Gene: LOC154449 (Intergenic)
  source 1..226: mol_type = genomic DNA
cgtgtgtgccttggcctggctgtagggcctgccaagcgtctgggactcatgaagggctccgggatttcagctctggtccagtccactggcctgagccagctgcaatgggctgcaggggagtgggggaggcaggctcgatcagaaccacagcctgggagggcctggctgggaggcccctgctcccagaaactcaccttctcccagaggggtctctgtccagcaggcg

SEQ ID NO: 5142 - DNA, 229 bp, Homo sapiens
  misc_feature 1..229: note = U/M: U (0.28:0.78) in Smooth Muscle cells
  misc_feature 1..229: note = source = chr15:62017772-62018000; Gene: VPS13C (Intergenic)
  source 1..229: mol_type = genomic DNA
cgcagaaagagaagggattctgtctggggaagccaaggaaagattcacagcaaggagacatgagatctaggttcgaagggagatggcagccctggcagaaggaaagaggcatccaaaggagtggaagtgtatgaaaagcgagccaaggggaagcagcttctgcgggggtggggatgggtgggagggttaaaggactgggaggtgtccttgcccagactgaagagactcg

SEQ ID NO: 5143 - DNA, 336 bp, Homo sapiens
  misc_feature 1..336: note = U/M: U (0.31:0.81) in Smooth Muscle cells
  misc_feature 1..336: note = source = chr11:62167036-62167371; Gene: SCGB1A1 (Intergenic)
  source 1..336: mol_type = genomic DNA
cggccctcctgccccctccccaactcagccagcccctggccagggtctgcctgcagcgggctcagatggggaaggcatgagtgtcctgctggtgtgagcaagatgttccaggcacctctaggacccagcgggcagcactgccctgaccttcctggggtcagctcccaggatggggtacagttggcccctggagagctacctgtgagggctagggcacaagcagcatcaggactaagctgcaggccatttggtgccaccctggccctgcctgggctctgagaccccataccacacacagcctggcttttgagcccatctcagcatcgaggctgcccg

SEQ ID NO: 5144 - DNA, 358 bp, Homo sapiens
  misc_feature 1..358: note = U/M: U (0.36:0.86) in Smooth Muscle cells
  misc_feature 1..358: note = source = chr15:61545575-61545932; Gene: RORA (Intergenic)
  source 1..358: mol_type = genomic DNA
cggtaacgcagtgttcaactttttgaggaactgccaaactgttttccacagcagctgcaccattctacattcccagtgacaatgtatgagcgttccaatttctccatatccttgcccataattattattggtaattcctcaaagatctagagtcagaaataccacttgacccagcgattctattactgggtatatacccaaataaatataaacaattctattataaagatacctgcacacatatgttcattgcagcattattcacaacagcatagacatggaatcaacccaaatgcccaccaatgatagactggataaagaaaatgtggtacaggtatacaccatggagtactatgcg

SEQ ID NO: 5145 - DNA, 428 bp, Homo sapiens
  misc_feature 1..428: note = U/M: U (0.32:0.82) in Smooth Muscle cells
  misc_feature 1..428: note = source = chr11:59989577-59990004; Gene: MS4A6A (Intergenic)
  source 1..428: mol_type = genomic DNA
cggaatgatcagccagctacttggtggcaagttgattatattagacctcttccatcacggaaagggcagcggtttttcctcaccagaatagacacttactttggatatgggtttgcctatcctgcacacaatgcttctggcaagactacaatccaagaactcatggaatgccttaaccactgtcatggtatcccacatagcattgcctctgaccaaggcactcacttgttggctaaagaaatgcggcagtgggctcattctcatggaattcactggtcttaccatgtttcccatcatcctgaagcagctggattgatagaatggtggaatgtccttttgaagtcacaattacaacatcaaccaggtgacaatacttttcagggctggggcaatgttctccagaaggctgtgcatgctctgaatcagcg

SEQ ID NO: 5146 - DNA, 469 bp, Homo sapiens
  misc_feature 1..469: note = U/M: U (0.33:0.83) in Smooth Muscle cells
  misc_feature 1..469: note = source = chr7:21427949-21428417; Gene: SP4 (Intergenic)
  source 1..469: mol_type = genomic DNA
cgaagaatgtcagaacagtatcttcatcactctcaaaatctcccatgctccacctattcattccttcctccccacaatctctggcaaccactgatctttttattgtttccatggttttgccttttctggaacgtgatatggttggaatcatactttaggtagccttttcagattggcttatttcacatagtaatgtgcatttcagattcctccacgtctactcatgtcttgatagcttgtttccttttagtgctgaataatattccattgtctaaatataccacagtttatccattcacttactgtaggaattttggttgcttccaagtttaaaccattatgaataacactgctgtaactattaatgtgtaggcttttgtgcagacacatttcagttcatttaggtaaatgccaaggagctcgattgctggagcatatgataaaggtaggtttaattgtgtaagaagcg

SEQ ID NO: 5147 - DNA, 355 bp, Homo sapiens
  misc_feature 1..355: note = U/M: U (0.31:0.8) in Smooth Muscle cells
  misc_feature 1..355: note = source = chr1:96105828-96106182; Gene: FLJ31662 (Intergenic)
  source 1..355: mol_type = genomic DNA
cggaggccaaattggttaagctctatgcccccaaacctggattctcttgtgtccttaaagcacgaataacttaaagcacattaccattattaaaactaccatggttattgctgttgttttaggagaaatatgcctcgataaagaaaggccacattttatggcctttgctgacatattcagcttaggatgaaccaagaacagcagctctctttttcctcactcatgtttaattactttttctgtcttgaaaattccatttgcgttaggccctctctattcacagcattttaattaatctgtagcatgttcctagccacattcctcaccactgcttctcctttcaatagataaagcg

SEQ ID NO: 5148 - DNA, 216 bp, Homo sapiens
  misc_feature 1..216: note = U/M: U (0.35:0.83) in Smooth Muscle cells
  misc_feature 1..216: note = source = chr7:157665797-157666012; Gene: PTPRN2 (intron)
  source 1..216: mol_type = genomic DNA
cgcttccattttgcactgagacctctgcctcattccctctgaccgggcctcttgcctgccctgaagtcctgcttcctcgctgcttgtgggagggggaggctccgactgtctctcctttatccaccaatgtttccgccaccagcgagtgctgagcaagtatctgttgaataaatgaatgtgcaccaggaaagaaagcagccgcctggcctgacctcg

SEQ ID NO: 5149 - DNA, 218 bp, Homo sapiens
  misc_feature 1..218: note = U/M: U (0.35:0.83) in Smooth Muscle cells
  misc_feature 1..218: note = source = chr16:6864852-6865069; Gene: RBFOX1 (intron)
  source 1..218: mol_type = genomic DNA
cgccaagagagggttcttggaccttgcacagaaaagaatttggggcgagtccatagagtaaaatgaaagcaagttttttaagaaaatacaggaataaaagaatggctgttctacaggcagagcagtggtatgggccgcccagctgctcatccttatcattacttcttgattatatgctaaacaagggatggattattcatagtttttcccggaaagcg

SEQ ID NO: 5150 - DNA, 286 bp, Homo sapiens
  misc_feature 1..286: note = U/M: U (0.33:0.81) in Smooth Muscle cells
  misc_feature 1..286: note = source = chr7:154389079-154389364; Gene: DPP6 (intron)
  source 1..286: mol_type = genomic DNA
cgaggcaggcagatcacagggtcaggagatcgagaccatcctggctaacacagtgaaaccccgtctctactaaaaaaagaaaaaaatacaaaaagttagccaggcgtggtggcaggcacctgtagtcccagctactcaggaggctgaggcaggagaattgcttgaatccaggaggcagaggttgcagtgagccaagatcgtgccactgcactccagcccgggagacagagtgagactccataaaaaaaaaaaaattgagtagtatattactttgctagggctgtcg

SEQ ID NO: 5151 - DNA, 331 bp, Homo sapiens
  misc_feature 1..331: note = U/M: U (0.3:0.78) in Smooth Muscle cells
  misc_feature 1..331: note = source = chr2:16119310-16119640; Gene: MYCNOS (Intergenic)
  source 1..331: mol_type = genomic DNA
cgtggtgttctccctcccctgctcttcaggacacactgcaagttcctggggatgactagaaccccacagcagcagttaactgtggggaaggccagtttcctccgtgctaggaggatgccccggcagggtgtgtgagagaacatggaagccactgtgtgctttctttccctttttacagcctgggaacctggggaaagcttccctccctgtgtaatagaatgcatgtgatggcatttcaggaccaaaagggtcctcacaggtcagctagtccaactgtctgtctgatgcttggcgtccctgtgaggtccccagcaggccccagacaggaacg

SEQ ID NO: 5152 - DNA, 435 bp, Homo sapiens
  misc_feature 1..435: note = U/M: U (0.29:0.77) in Smooth Muscle cells
  misc_feature 1..435: note = source = chr17:31745526-31745960; Gene: ASIC2 (intron)
  source 1..435: mol_type = genomic DNA
cgtttaagtctttaatccatcttgagttaatttttgtataaggtgtaaggaagggacccagtttcagctttctgcatatggctagccagttttcccaacaccatttattaaatagggaatcctttccccattgcttatttttgtcaggtttgtcaaagatcagatggttgtagatgtgtagttatttctgaggcctctgttctgttccattggtctatatctctgttttggtaccagtaccatgcagttttgattactgtagccataaaaaaggatgagttcgtgtcctttgcagggacccggatgaagctggaaaccatcattctcagtaaactaacacaagaacagaaaaccaaacaccacatgttctcactcataagtgggagttgaataatgagaacacacggacacgggggaggggaacatcacacaccg

SEQ ID NO: 5153 - DNA, 438 bp, Homo sapiens
  misc_feature 1..438: note = U/M: U (0.33:0.81) in Smooth Muscle cells
  misc_feature 1..438: note = source = chr13:68453611-68454048; Gene: PCDH9 (Intergenic)
  source 1..438: mol_type = genomic DNA
cgctcatgacctaatcaccttccaaaggccccacctcctgataccattatattgtgggttgggatttaaacatatgaattttgagggaacacaaatttgcagtacctcctaaatatttagactttttctcttactttcaatattttgcactgcacagttttaagcatatttagttaacggcaaaatggaatttatttcctcacatttgcctcttttttatgtaatcatatcatgatatcatctgctttgtttatgtagagaagaattctatatacccttttagaagatactgagtggacttaatcagtacaactgtgttgcattaacttttatataagccaaattcctgaaattatatatgtgcatgcatacatacacacagactcttacagcctttgaggaacggttgaacatatggacatgtcattccgaaactcg

SEQ ID NO: 5154 - DNA, 102 bp, Homo sapiens
  misc_feature 1..102: note = U/M: U (0.34:0.81) in Smooth Muscle cells
  misc_feature 1..102: note = source = chr7:157667235-157667336; Gene: PTPRN2 (intron)
  source 1..102: mol_type = genomic DNA
cggggtcacctgcacggcctctcgtgagtagggggatttcctactcgctccacagacagctcccggggtccggggagaagcggaggggggcagagaaggccg

SEQ ID NO: 5155 - DNA, 209 bp, Homo sapiens
  misc_feature 1..209: note = U/M: U (0.36:0.83) in Smooth Muscle cells
  misc_feature 1..209: note = source = chr14:98724094-98724302; Gene: C14orf64 (Intergenic)
  source 1..209: mol_type = genomic DNA
cgagtagctgggattacaggcatgcaccaccacgcctggctaattttgtatttttagtagagacatggtttcacatgttggccaggctggtctcgaactcctgacctcagattatctgcccacctctgcctcccaaagtgctgggattacaggcgtgagccactgtgcccggcctccagatgcacatttcaacctcacaatatgtctcg

SEQ ID NO: 5156 - DNA, 372 bp, Homo sapiens
  misc_feature 1..372: note = U/M: U (0.33:0.8) in Smooth Muscle cells
  misc_feature 1..372: note = source = chr13:70710716-70711087; Gene: ATXN8OS (intron)
  source 1..372: mol_type = genomic DNA
cgtattcaggaaatcatcaagaccgctagcaggagaactcccttacagacctagacctcccacctctagactcatacatgagagagagagaaagttttgcttttctcaagacacagttcttttgagtgcttcttttactttcagccaaacttagttccatttaataggttttaatatatacttaaacaaattattatagtaaaagtaatgaagtaaaattatttcaacttacaacaatataaaataaacgtttcgtagggaaatgaacagaactacttaaaacttcagaacacaaggctattttactagattttgttcagtttaatagaagcgtgttccacatcacagacaagattccagtgtttagttgcg

SEQ ID NO: 5157 - DNA, 326 bp, Homo sapiens
  misc_feature 1..326: note = U/M: U (0.33:0.78) in Smooth Muscle cells
  misc_feature 1..326: note = source = chr12:109477369-109477694; Gene: USP30 (Intergenic)
  source 1..326: mol_type = genomic DNA
cgagaaaaaatgtggggtgctgtaactattcttattactaagtgataagaatccatttttttttttgagatggaatctcaccctgtcaccaggctgtagttcagtggcacgatctcagctcactgcaacctccacctcccaggttcaagcaattcttctgcctcagcctcccaaatagctgggactacaggtgcccgccaccacacccagtgaatttttgcatttttggtagagatgtggtttcaccatgttggccaggatgatctcgatctcttgacctcatgatctgcctgccttggcctcccaaagtgctgggattacaggcg

SEQ ID NO: 5158 - DNA, 361 bp, Homo sapiens
  misc_feature 1..361: note = U/M: U (0.35:0.8) in Smooth Muscle cells
  misc_feature 1..361: note = source = chr1:166754379-166754739; Gene: POGK (Intergenic)
  source 1..361: mol_type = genomic DNA
cggctcaccctccgtgggctgcacccactgtccaaccagtcccagtgagatgaaccaggtacctcagttggaaatgcagaaatcacctctcttctgcatcgatcttgctgggagctgtagaccagagctgttcttatttggccatcttggaagcgaccccccttttttttgtattttcaagacaaggtctcacttctgttgtctcactcacatctgtgcagtggcacagtcatggctcactgcagccttgacatccatgggcttaggtcttgacctcccactttagcttcctgagtagctgggactacaggaatgcaccaccatacctggctaatttttggattttttctatagagacacg

SEQ ID NO: 5159 - DNA, 369 bp, Homo sapiens
  misc_feature 1..369: note = U/M: U (0.34:0.79) in Smooth Muscle cells
  misc_feature 1..369: note = source = chr14:97715471-97715839; Gene: LOC100129345 (Intergenic)
  source 1..369: mol_type = genomic DNA
cgctgcacccactgggcctgggcctggccttggtactcccacttgaaaccctcagcttggctccagctcgccattccagcctcctgcctcacagccccctcattgcttctctcccgccatgccagtctgcaggcagctccgaaggcatgacattcatggccacagtgccactgctgtgacttcactcgcactaggcattcacttgagattgacttacctgcttctccactgggcatcagtgctcctgagatggaaaaatgaagtctgtgctcatgattgtcttctagcagtgtttctttggtcctttttctgatatttcatggcaatatgccctactcctcacatttagtactatgcagtgtgcccccg

SEQ ID NO: 5160 - DNA, 380 bp, Homo sapiens
  misc_feature 1..380: note = U/M: U (0.35:0.8) in Smooth Muscle cells
  misc_feature 1..380: note = source = chr13:53517414-53517793; Gene: OLFM4 (Intergenic)
  source 1..380: mol_type = genomic DNA
cgaagttttattttatttgactgctgcgggggaaaagccctctttatttttgaacaggagactcttagaaaatcagcccgagccaggcattttctagtaccctgaacaaatgcagaatttgctgtcagcctgattggacacggctccacgtcagggtctgctacctgcaggcttctatggcgggtcccatgacatatgctgccaggctggaaggaagctccacagacagcaggtccccttcccagacagatgggggtctctccttttctgaaacatcccttgggaaggcttgattgggagcatcttcccaaaatgggatgtctgtgtgttgtgagtggctttattgctcagagcatctggatatgttgtgataaacagcg

SEQ ID NO: 5161 - DNA, 65 bp, Homo sapiens
  misc_feature 1..65: note = U/M: U (0.31:0.75) in Smooth Muscle cells
  misc_feature 1..65: note = source = chr3:194756583-194756647; Gene: XXYLT1 (Intergenic)
  source 1..65: mol_type = genomic DNA
cgatgcaatcgggggggagcgtggtgggtggggcacagcctgaaggaggaggtcgagcaaacacg

SEQ ID NO: 5162 - DNA, 324 bp, Homo sapiens
  misc_feature 1..324: note = U/M: U (0.35:0.79) in Smooth Muscle cells
  misc_feature 1..324: note = source = chr8:10825656-10825979; Gene: XKR6 (intron)
  source 1..324: mol_type = genomic DNA
cgcctctccattcctggccttgcatccggtctgtgctggtgtttgaaccggatctcccaccgctcctaggcctcccaggttcccctccgtcctccgtcagctgcccccacttctctctctaccaaagagaaaagtgcctctgcagattggactcggctcacccatttaaaaaattagagaacagagaagttagcatcttaataagttaaatgaatcagtagaatgtgtgtctctttcccttccctgtgggactggaatcttccatttccctccaggtgctctccccagctttgtgccctcagggctggcctatggcccccttcg

SEQ ID NO: 5163 - DNA, 389 bp, Homo sapiens
  misc_feature 1..389: note = U/M: U (0.35:0.79) in Smooth Muscle cells
  misc_feature 1..389: note = source = chr3:117987970-117988358; Gene: IGSF11-AS1 (Intergenic)
  source 1..389: mol_type = genomic DNA
cgacatttttttttcagtagtttcagcagttcagcatgcagtgagaaaggagatacggctttgccatcatgcatggttatataaaataatgtagccttccccaggctcccaaagagaaggtaggtaccctggacacgcttactaggaacacttttgacatctatcatacaaaaaattaggaaagattttgtctaccaacaccccagcctgggatatgggatttttctctttttatttatctgtggtaactacttccataacattcaatgtgatgtgcactatggtaatttttatattgtgcaaaatttgtactcacagtgtaaactctgtaatcacaattgtgtaagctctttgaggaaaagaacgcttcctattgagaggtgacagcg

SEQ ID NO: 5164 - DNA, 457 bp, Homo sapiens
  misc_feature 1..457: note = U/M: U (0.34:0.78) in Smooth Muscle cells
  misc_feature 1..457: note = source = chr2:153958-154414; Gene: FAM110C (Intergenic)
  source 1..457: mol_type = genomic DNA
cggaccagaagagtgtgcagttgcaagatttaatagagtgaaaacagagctcccataaaatgggaggggacccaaagggggttaccatggccggctcaaatgcctgggtttatatcccaatcattgtccctcccactgtgctctcaggtgatagatgattggctatttctttacctcctgtttttgcctaattagcattttagtgagctctctttactacctgattggtcgggtgtgagctaagttgcaagccccgtgtttaaaggtggatgcagtcaccttcccagctgggcttagggattcttagttggcctaggaaatccagctagtcctgtctctcagtgccccctctcaacaggaaaacccaagtgctgttggggaggttggctgacaactgctctaactgcttcctgttgaattggggcatagtaggggtcatgcagttgagatttcctcg

SEQ ID NO: 5165 - DNA, 460 bp, Homo sapiens
  misc_feature 1..460: note = U/M: U (0.34:0.78) in Smooth Muscle cells
  misc_feature 1..460: note = source = chr7:157823927-157824386; Gene: PTPRN2 (intron)
  source 1..460: mol_type = genomic DNA
cgacctcgatctcaccgtgatggagacatcaatggtgaggtcatgacttttgcaccttcctgaattttttcctgcatccctgtactcactcatttccagtatctgacatttggggtctatttggttttgaaggaaagacaggtctcaccagagggtggagcaacaaataataaagccacagaaatgctcttaattgtcataaaatattcatttataaccaatatgtttgtgccaaattccgtcactctgtgagaatacagtgtacccaagtgagagatttagaaagccctttaagctgctttttacttgttaaatgaaaaaatataatcattaggcatattcaggaattgggaaattaatgcttattagacttcaggaaaaaaagaaaaagataaatggagggcaagcagaggatattctccaggaagacagcctcagccacactttccagaaggcatcg

SEQ ID NO: 5166 - DNA, 141 bp, Homo sapiens
  misc_feature 1..141: note = U/M: U (0.34:0.77) in Smooth Muscle cells
  misc_feature 1..141: note = source = chr1:111040980-111041120; Gene: CYMP (Intergenic)
  source 1..141: mol_type = genomic DNA
cgccagcaaacatcacaaaaatcttttgttaggcctcacgtcccagtttttagtccagaaggtgtgattcccattcagccggggcttccaagcccctgacgtagagcagggatttgaatggaaaagagagaagcagctgcg

SEQ ID NO: 5167 - DNA, 323 bp, Homo sapiens
  misc_feature 1..323: note = U/M: U (0.33:0.76) in Smooth Muscle cells
  misc_feature 1..323: note = source = chr3:97353123-97353445; Gene: EPHA6 (intron)
  source 1..323: mol_type = genomic DNA
cgtgttcaatgaatgttagctatttttctcctataataatgtggaagaaattatcagatgcattcccaaaagcatatagaactatttgtagagcttttttcttttcgtcaagcccacattttataaacagtagatagaccaattggatcgtggataaatagacagaagattgtagtgatagagagataaaataacacaggtggggttccctgggaaagattgtaaaaagatgtgcacgcaggaactttgttgggagggctcacaggaccagcttccttattcctatagcttccagagttttggaagctgatagcccttaaccg

SEQ ID NO: 5168 - DNA, 402 bp, Homo sapiens
  misc_feature 1..402: note = U/M: U (0.33:0.76) in Smooth Muscle cells
  misc_feature 1..402: note = source = chr11:39890287-39890688; Gene: LRRC4C (Intergenic)
  source 1..402: mol_type = genomic DNA
cgtctcaaaaaaaaaaaagaaaagaaaattctatattagacaattgcatctttaagggcagaaaatctatcctattatcctatttatatttatattctctgtaaggtaagtattgttccaggcacatggttgttatttagtaaagttttgatgagaagataagtgaatgaacacaaaaaccagaacacacacacacacacacacaaacacacacacacacacacacgatggcagcttttcaggaatttgtgatctcactgcagggagaaaaatctttctacattaagacttagaaatagggccgggcatggtggctcatgcctgtaacctagcactttgagaggctgaggtgggcccactgcttgagctcaggaattcgaaatcagcctgggcaacatggcg

SEQ ID NO: 5169 - DNA, 141 bp, Homo sapiens
  misc_feature 1..141: note = U/M: U (0.38:0.8) in Smooth Muscle cells
  misc_feature 1..141: note = source = chr12:34029238-34029378; Gene: ALG10 (Intergenic)
  source 1..141: mol_type = genomic DNA
cggatcacctgaggtcaggtgttcgagaccagcctgatcaacatggagaaaccccgtctctactaaaattacaaaattagccaggcatggtggtgcatgtctgtaatcccagctactcgggaggctgaggcaggagaatcg

SEQ ID NO: 5170 - DNA, 278 bp, Homo sapiens
  misc_feature 1..278: note = U/M: U (0.3:0.72) in Smooth Muscle cells
  misc_feature 1..278: note = source = chr1:35213151-35213428; Gene: GJB5 (Intergenic)
  source 1..278: mol_type = genomic DNA
cgataaccagttctccctcccttcttccctgcctgcctcgctattccgtttcgctcaaacatccccagggaagccgattacggaggggcccgctgggtgaggagggtgggatcctcattaccttgtggaaggtcagagagactgaatggcgggggcatccctccaacctccaccaagcactaaggccacagttggtctggacaccccaggcctggccccttttgtctgtcctgggcatcacggcttactctctggatcattatctccagctaggagcg

SEQ ID NO: 5171 - DNA, 315 bp, Homo sapiens
  misc_feature 1..315: note = U/M: U (0.35:0.77) in Smooth Muscle cells
  misc_feature 1..315: note = source = chr10:1903252-1903566; Gene: ADARB2 (Intergenic)
  source 1..315: mol_type = genomic DNA
cgtaatagtttcacacacctctgtgagcagctgggaagatctcggaatatcagcttccctcctgcttccctcttcagtacacaatccatttctttaataccaacttaaagtgagttatatttgacagcattgcacaagccatgactgcacggctattgctatctgtgaaaagattcatttggatctttggcatgtatacttcagaatcctgtacactcttggtttccattgattctgtagcttctacttttgcacggctccatagtttcatgtttagtgttgctgaacaaaagaagaggctttctctttgcttcg

SEQ ID NO: 5172 - DNA, 335 bp, Homo sapiens
  misc_feature 1..335: note = U/M: U (0.36:0.77) in Smooth Muscle cells
  misc_feature 1..335: note = source = chr8:102324166-102324500; Gene: NACAP1 (Intergenic)
  source 1..335: mol_type = genomic DNA
cgaggtttgacgatgaagtagggtacttcctggtgagatttactgctaaagactttgccagaggagatttcttctaatgatcaggcccctcagtaaaatgtatcttctatatttctaattataattgaccaaggaaaaaagtccaaatcaatttttatggacagtgaagcctccactgtcctaagttggtgtctgccttttctgtctccctgaattctacctccctcccagaatgcctggttcagtctgtgtgctcccggggggtgatggataacactgttaaacactctgtgcttcagtttcctgctatataaagcgaggacagtgataggacg

SEQ ID NO: 5173 - DNA, 243 bp, Homo sapiens
  misc_feature 1..243: note = U/M: U (0.34:0.74) in Smooth Muscle cells
  misc_feature 1..243: note = source = chr22:47651354-47651596; Gene: FLJ46257 (Intergenic)
  source 1..243: mol_type = genomic DNA
cgaactcctgacctcaggtgatctgtacatcttggcctcccaaagtgctgggattacaggcgtgagccactgcatctggcctatttttactttttaatatatatctattttttttgagaccaagtcttgctctgtcacccaggctggagtgcagtggcatgatctcagctcactgcaacctctgcctcctgggttcaagcgattctcctgcctcagcctcccgagtaactgggattacaggcg

SEQ ID NO: 5174 - DNA, 103 bp, Homo sapiens
  misc_feature 1..103: note = U/M: U (0.34:0.73) in Smooth Muscle cells
  misc_feature 1..103: note = source = chr3:128440063-128440165; Gene: RAB7A (Intergenic)
  source 1..103: mol_type = genomic DNA
cgtacattccctccccttttgaaagtccctaataaaaaattgctggttttgcggcttgtggggcatcacggaacctaccaacatgtgatgtctcccccggacg

SEQ ID NO: 5175 - DNA, 342 bp, Homo sapiens
  misc_feature 1..342: note = U/M: U (0.35:0.73) in Smooth Muscle cells
  misc_feature 1..342: note = source = chr1:37868647-37868988; Gene: LOC728431 (Intergenic)
  source 1..342: mol_type = genomic DNA
cgacccttaagggcctgctccatgaactgtttcccccgagcattttcaaaacctaattcatcatcttctcctccactccacaaactcctgtatctgtgtcctgtattccaaggcaacctggcagtcaaactcgactcctccctctccctccctctcacatctgatcattcactaagccctgtctcatccagcctctatcagccttctcctccctgggcctaacagggctcattgactgtcattcccattttcccctctggaaggtgccaaggacctggggcttcccacccaggcattcgcaggccctggaatgggatcctccacctcctgccccactgatcg

SEQ ID NO: 5176 - DNA, 270 bp, Homo sapiens
  misc_feature 1..270: note = U/M: U (0.35:0.72) in Smooth Muscle cells
  misc_feature 1..270: note = source = chr10:38802268-38802537; Gene: LOC399744 (Intergenic)
  source 1..270: mol_type = genomic DNA
cgaaaggaatggaaaggaatggactcgagtggattggaatggaatggaatggacacgaatgaaatggaatggaatgaaatggaatagaattgaatcaaaaggaatgtaatggaatgaaatggactcaaatggaatggaatggaaagtaaagcactcaaaggaatggaatggaatggaatggactcgaatggaatgcaattgaattgaatggacttgaaaggaatataatgtaatgtaatgtaaaggaatgtaatggaatggaatggaacg

SEQ ID NO: 5177 - DNA, 386 bp, Homo sapiens
  misc_feature 1..386: note = U/M: U (0.36:0.73) in Smooth Muscle cells
  misc_feature 1..386: note = source = chr2:242957814-242958199; Gene: LOC728323 (Intergenic)
  source 1..386: mol_type = genomic DNA
cgaatctccctcaaatgtcctctctccctgggacccctcatttttgttcttgagctagaaagccggggatttagttacctcctgagctgtgcactcccacagctgagccaggcctgggccaagtgctgggcagacggagggagaaagaagcagtgggtctggccccatcttgctggagccccacatggagaggaggttcccctgtggggctgggtcctgccctctgccattgttggcacagttgctgccacagacccaggtgattgccgagggcagggggcagagggaagggtgtggggagggtggggtgtctgcccttccccttaagtcctctctctgtggccccaagctcagactgtgtggtccttcctggagtgtcctgcacg

SEQ ID NO: 5178 - DNA, 263 bp, Homo sapiens
  misc_feature 1..263: note = U/M: U (0.37:0.72) in Smooth Muscle cells
  misc_feature 1..263: note = source = chr9:126755520-126755782; Gene: LHX2 (Intergenic)
  source 1..263: mol_type = genomic DNA
cggccccagcccctacatcctgtcagattagagaccagcagaagggatcaaagacctctcccaggtcctcaagccaaagcccaggatgggctgccattgggccggattgccagtccctcagccaatcactgtggccacagcagtggaatgcacggattggcttaggtttgggtcacatgccgcttcccctggagtcctggtggaactgcttctaccagaaccactggactgggaggaaagaaggggaggaaaggagtaggacg

SEQ ID NO: 5179 - DNA, 255 bp, Homo sapiens
  misc_feature 1..255: note = U/M: U (0.37:0.87) in Smooth Muscle cells
  misc_feature 1..255: note = source = chr16:68767970-68768224; Gene: CDH1 (Intergenic)
  source 1..255: mol_type = genomic DNA
cgatggtataaaatatgtatttttacataactgagaggaaaaaaataagcagacagtacagccccatgggggaaacgcctctttctgtatttccattatcttgttcaaggcacgatcctagtgggaaaggaaataccggagccttctccctctgagcctcctggtgggttaagagcagagggagccaaaatacgacatccaaaagacctgattggaaactcattaaaattgaggggacaggttgttggggggggc

SEQ ID NO: 5180 - DNA, 419 bp, Homo sapiens
  misc_feature 1..419: note = U/M: U (0.31:0.84) in Smooth Muscle cells
  misc_feature 1..419: note = source = chr4:38426698-38427116; Gene: KLF3 (Intergenic)
  source 1..419: mol_type = genomic DNA
cgcatcatgaacagaaatcggcagcttagtgtttctgctggttgtggcctaaatgctcttttacaatggaaggagaatctactcgtggccaatgtgaatttcgaaaaagttgtacttgaagtaacggactgggagccaggattctagggttccagacctggttctgcagcacactctgagtcttttagtcatttagtctctctggattagagttttccctttttacacaaaaagggatgtttttggatgtttaaacttgccaagctctgatgccagatttaaaaatcctacaattctttcactgctatgtattccctaaaaagaacgttctgcctgaccctgcaataacctaagtactatgtatttcatcagcttcaagaaatagttaaatggaaagacgaaaatgaaaaactgtctcg

SEQ ID NO: 5181 - DNA, 341 bp, Homo sapiens
  misc_feature 1..341: note = U/M: U (0.31:0.78) in Smooth Muscle cells
  misc_feature 1..341: note = source = chrX:90908496-90908836; Gene: PCDH11X (Intergenic)
  source 1..341: mol_type = genomic DNA
cggtcattgtgttctctctcccacaagtgcacagattctctctgcgttccatgtggtccttgctaaaggatgggggaggtgtagcatcagtgacccaagactgtctttcctaccctcttcagagtctctttcagcaatagaaagttaaaactgggtactctgattgctcgcttgatttttgcttcttatgatgatgcatttctgtgtagttgttaaaatttggtgttcatgaaagagtggatgataagtggaggcttctattcagccatcttgctctgccccgtgcttctttctttgacattgtattcttcagttctcacattgctataaaggaatgcccg

SEQ ID NO: 5182 - DNA, 94 bp, Homo sapiens
  misc_feature 1..94: note = U/M: U (0.17:0.87) in Smooth Muscle cells
  misc_feature 1..94: note = source = chr12:122206348-122206441; Gene: TMEM120B (intron)
  source 1..94: mol_type = genomic DNA
cgtcaagggaagagtgatggtttagatccagtctcgttcttacgatgtgcgtatgcgagaccctgcctggaaaaaaaagagaaagcacgtgggc

SEQ ID NO: 5183 - DNA, 253 bp, Homo sapiens
  misc_feature 1..253: note = U/M: U (0.36:0.81) in Smooth Muscle cells
  misc_feature 1..253: note = source = chr14:28514717-28514969; Gene: LINC00645 (Intergenic)
  source 1..253: mol_type = genomic DNA
cggttattgttttaatagtttgttttacttaattttcttttttcatatgtccgttgtgttgcttccaatgtggctttatttctgttttcttttctacgtccttcctgattcagctagctcacgttatgtttttgtatgtttcttaagcccatatcttcattaattctaccctcgttgttttaaaatttttggtggtttcgttgatcaccttgtttatggtgacatgcttgtatatgctttctatttgctcagc

SEQ ID NO: 5184 - DNA, 326 bp, Homo sapiens
  misc_feature 1..326: note = U/M: U (0.15:0.82) in Smooth Muscle cells
  misc_feature 1..326: note = source = chr7:28887244-28887569; Gene: TRIL (Intergenic)
  source 1..326: mol_type = genomic DNA
cgaggtcagccaaggactgggtgtgaaaggccgtctttattctgcacggttatcacaggcagcccatctcctgagtgaaatttcaggaatggaagttcctcagggaaagatgccatttcatcctctaagctgcatcagctggagctgggaggcaaccggttacatctgcggaacagcttgggccgggaccgtgtgttctgtcagcttttaggtggggtccactcaggctcgcgccaggatttcagccgggccctccctgctccccgccctggcctagctgagcatctcaggaaagaaacagtaacttccctgcagaggctcacccg

SEQ ID NO: 5185 - DNA, 472 bp, Homo sapiens
  misc_feature 1..472: note = U/M: U (0.24:0.85) in Smooth Muscle cells
  misc_feature 1..472: note = source = chr9:104083380-104083851; Gene: LPPR1 (intron)
  source 1..472: mol_type = genomic DNA
cggcatctttgtaatttttggaacagaaccatcttcccagcatgtggaccttttcagatcagagattagaacctctcttcagagcacacattcgtacacatgaaatccatcccactattcaaaatatcttaaggagaagactggatggggagggcatcagtcacgctcgtttccctttctcccaagacattctttcccctttgccacatgcagccctcagagccacagtgctctgggcctctctaaaacattacctcaaatttgaatatctaccttctgtgattccccttagtatagttgattgagatggggtgcattttctaaaatctttcccaaataccatagagaaaccaaaaagtaaacaattataaaacaaaaatagtcaagtttttcaaagcattattttatgattgtataaagttgttgggatcccaaaggaaccaattcttaattatccatgttctacaccccg

SEQ ID NO: 5186 - DNA, 452 bp, Homo sapiens
  misc_feature 1..452: note = U/M: U (0.25:0.85) in Smooth Muscle cells
  misc_feature 1..452: note = source = chr19:10928691-10929142; Gene: MIR199A1 (promoter-TSS)
  source 1..452: mol_type = genomic DNA
cgagccgggggcagggcttctgcagagccccctcccctagccccttctaaagcccccaaaactcttccccgaaaggtgggagggacccaggccctgtgttacccagccttgcctgggatgacgggtgcaggctttcttcatcaccttccctcccttgggtccgcagcggcatccctccctccatggccaccgggcccctctcctatgctctgctccctccatggccaccgggcccctctcctatgctctgctccctccatggccaccgggcccctcttcctatgctctgccctacttctttgcctagagcctggcaggctaatcctggagccgctcacaagagcaaccaaagaaaatcccgggtgctcatgggcaccagctctgcagtgggcaccaagctcctccatcctccttggatagatgaggaaactgagatgaaatgggaggtggcg

SEQ ID NO: 5187 - DNA, 275 bp, Homo sapiens
  misc_feature 1..275: note = U/M: U (0.26:0.85) in Smooth Muscle cells
  misc_feature 1..275: note = source = chr9:18012503-18012777; Gene: SH3GL2 (Intergenic)
  source 1..275: mol_type = genomic DNA
cggggctgggcttgtgctggagcccaagactcgtacgtgaacattgctttccaactacggaatttaaaagcatgagggaagagaatagtcacagatttgtgtgagaatgctgagacaggtgacagaacacctcaccctggagccctcagaaatgtctgtggtgggtattaggaaggaggatgtgaggtgtgggcttctcccaggagatggggagtcccctagaatactttgatccttggaagcatctttcagggttgatgaggtatcacaatgcg

SEQ ID NO: 5188 - DNA, 306 bp, Homo sapiens
  misc_feature 1..306: note = U/M: U (0.28:0.86) in Smooth Muscle cells
  misc_feature 1..306: note = source = chr22:29589074-29589379; Gene: EMID1 (Intergenic)
  source 1..306: mol_type = genomic DNA
cgaagcctcttaggattatggatgaaaaagaatgattttataaaactcagcaattcttaagaagagtacagccaaaaaagctttctcactcctttatagtttcttccaataactggctcaccaagtcagaggctgagcaggcagacagccgcagacctaagggaagctatgaccatctcatctgcaagaatgagagtggccaggtgcggtggctcacgcttgtaatcccagcactttgggaggccaaggcaggcggatcacgaggtcaggagatcaagacaaccctggccaacacggtgaaacccg

SEQ ID NO: 5189 - DNA, 442 bp, Homo sapiens
  misc_feature 1..442: note = U/M: U (0.3:0.82) in Smooth Muscle cells
  misc_feature 1..442: note = source = chr14:36921436-36921877; Gene: SFTA3 (Intergenic)
  source 1..442: mol_type = genomic DNA
cgttacattacattacatgagaaaagagactttgcagacgtgattaaattaaggaccttgagaggagggggaggatcttggactacccaggtgggcccaatgtaatcacataggtccttaaaattggagaattttcccagctgtggtcagagggaggcttggctgcagaatagtgagagagacgcaatgttactggctttgaagatgcaatggtgtttggctcctttgagccaaggagtgaggaaactgtaaggaaacagattcagcccaagagcgttaagaaggaacatagccctggcaccatctggatttcagcctagtgagacccattttggccttctgacctccagaactgtaagctcataaatgtgtattgtttatgccattaaatctgtagtaatttttacgataggaaactaatatagtttggaattacaattcg

SEQ ID NO: 5190 - DNA, 254 bp, Homo sapiens
  misc_feature 1..254: note = U/M: U (0.3:0.8) in Smooth Muscle cells
  misc_feature 1..254: note = source = chr9:104450777-104451030; Gene: GRIN3A (intron)
  source 1..254: mol_type = genomic DNA
cgttggaaaaatcatcactgggaagcattcaacagggatggggaattagaagcccctcaagatcttgattacatgctaagtgttctactgctgttcatggtagggagggtaatgaaaaatggtctttttaaaattaaaaaggattggccaggcacggtggcttgtgcctgtactcctagcactttgggaggccgaggcaggatcacttgaggtcaggatttcgagaccagcctggctgttatggtgaaaccccg

SEQ ID NO: 5191 - DNA, 441 bp, Homo sapiens
  misc_feature 1..441: note = U/M: U (0.33:0.73) in Smooth Muscle cells
  misc_feature 1..441: note = source = chr14:70670452-70670892; Gene: SLC8A3 (Intergenic)
  source 1..441: mol_type = genomic DNA
cgtgtgccaggtgatgtgcagaagaggctgcataacaaaacacaggaaatcacagacaccttctgttactcacagatccataggagaagaagggtgcccatgacagccagcagcaagtctggaaacggcagcatgcccagccagcaggtagagggtgacagagagagagaatctgtggcactaaagcccttattggggtcagggcgttatccaagcaggtttcctgagagttctagttggtgggtttagaacaaacaggcacacgttacatgggctcactgtgtaactgagaggtggtcagtgctgcatatctgcacagtccattcagggtgagtcagtggggccaggtaagtaggctgtatctagctgtccctcagggtagtggccaccagtaggcagttgtttaaggtagataaatggattgaccaccttgaggaaccg

SEQ ID NO: 5192 - DNA, 218 bp, Homo sapiens
  misc_feature 1..218: note = U/M: M (0.81:0.16) in Smooth Muscle cells
  misc_feature 1..218: note = source = chr8:26048065-26048282; Gene: PPP2R2A (Intergenic)
  source 1..218: mol_type = genomic DNA
cgcgcaaagcctccgctgagtcccccgacttcgtgacctgaatggtaatctcgcttagaatgaattctagtatttgctattactctaactgattccatggtcagcctcgcattccaccagtgagacgcttatgggaagggtcaaatggctttagggactcacaggctgacttggttattcacagagaagtaaatgttttgcttacccagaagatgacg

SEQ ID NO: 5193 - DNA, 83 bp, Homo sapiens
  misc_feature 1..83: note = U/M: M (0.75:0.15) in Smooth Muscle cells
  misc_feature 1..83: note = source = chr8:26047813-26047895; Gene: PPP2R2A (Intergenic)
  source 1..83: mol_type = genomic DNA
cggcggcagggcagggccgggcccctggagcaccgtatgtagcagtgtgcgagcggcgacgacagcgggagccgggcgtggcg

SEQ ID NO: 5194 - DNA, 148 bp, Homo sapiens
  misc_feature 1..148: note = U/M: M (0.62:0.11) in Smooth Muscle cells
  misc_feature 1..148: note = source = chr8:143483475-143483622; Gene: TSNARE1 (intron)
  source 1..148: mol_type = genomic DNA
cgagccaggaactaaaagaagaggcaagtgtgcagcagaggaaagaaagggcgccaggtgtggctggaaaggcacctggcaggatgaggggcggagaagcaccggcggagcagcacgcgcgaggcccattttgagccgcaccacaccg

SEQ ID NO: 5195 - DNA, 160 bp, Homo sapiens
  misc_feature 1..160: note = U/M: M (0.7:0.19) in Smooth Muscle cells
  misc_feature 1..160: note = source = chr8:72757629-72757788; Gene: MSC (promoter-TSS)
  source 1..160: mol_type = genomic DNA
cgacaaaggagcaccctgaatgatcatgttccattccaaacaagactaaaacatcctgctcttccacacaagaaaacacaacaattttgcagtctcattatttcctaactcgaaggtcatcgcagttcctggtcaggggataagtacgtctgtggatacg

SEQ ID NO: 5196 - DNA, 259 bp, Homo sapiens
  misc_feature 1..259: note = U/M: M (0.68:0.19) in Smooth Muscle cells
  misc_feature 1..259: note = source = chr7:73242001-73242259; Gene: CLDN4 (Intergenic)
  source 1..259: mol_type = genomic DNA
cgcagcaggtgggtgggactgagccaacggtctcttggcatcaacaaagcatcaacaaatctctctccagctccacttgtgctgagctactggctgatccccaaggacatccttctggcctctccttcacacctgggtcccctagccctgcgtgagctctgtgcttcttcccctgccctgtgtctgctctatgcctggagcctctgtacctgccctctcctcaacccccaacccctccctgctctcagctcccgatacg

SEQ ID NO: 5197 - DNA, 322 bp, Homo sapiens
  misc_feature 1..322: note = U/M: M (0.65:0.16) in Smooth Muscle cells
  misc_feature 1..322: note = source = chr22:50587574-50587895; Gene: MOV10L1 (intron)
  source 1..322: mol_type = genomic DNA
cgctttacagcggccagttcagctgctctcacctcagccacctcccgagagacacgtgggaggtggaggctcagagaggggaagtcaggactagagcctgggcattttgataatgacaggagtgagacgcaggtggagagcaggccaggagcctgcggcgcttctcctgtgagctgcccccaggaggcgctcgtgtgttgcccatcgctcccaccccttcttccctccacatctctagaaatacagacgctgcgtgcaaagcactgggtgctgatgtggcttagcatctcctgacacctgtggcctgtcctccctccagccg

SEQ ID NO: 5198 - DNA, 83 bp, Homo sapiens
  misc_feature 1..83: note = U/M: M (0.63:0.16) in Smooth Muscle cells
  misc_feature 1..83: note = source = chr2:191273996-191274078; Gene: MFSD6 (intron)
  source 1..83: mol_type = genomic DNA
cgcaactttccccctcgttaatcccatccccacatggacagacaggtgggttaattacctttatgcattcgcaaccacggacg

SEQ ID NO: 5199 - DNA, 375 bp, Homo sapiens
  misc_feature 1..375: note = U/M: M (0.66:0.19) in Smooth Muscle cells
  misc_feature 1..375: note = source = chr8:98789994-98790368; Gene: LAPTM4B (intron)
  source 1..375: mol_type = genomic DNA
cgactttggtaaaagccaagaaattctttactgaaattgaaaattatagcaaaaggatagtaggtggctcaaaatagttggtgcttttattgatgatcaagacagcctgttttatacaagtgtctgccttccttgaaaatgttcaaatctgccgacttgcaagtacatcagagaacgtaatttgtaaaatctagggcattgcattaggcaaatgtactacgtgatccacaggaaagataaatcctacttgagccctgttggctgtaatccaaccagacagtgtaggtgtgataaaaggagagtactcagcatgctttgtctactgtttgagcacgctctctgtggaaagtagttattggtgtgtttgtcttaacg

SEQ ID NO: 5200 - DNA, 320 bp, Homo sapiens
  misc_feature 1..320: note = U/M: M (0.62:0.19) in Smooth Muscle cells
  misc_feature 1..320: note = source = chr4:105411438-105411757; Gene: CXXC4 (intron)
  source 1..320: mol_type = genomic DNA
cggttttttaatgagaacaggcttgtgtaccacaaactgtgtcctcactgttataaatgggccactaacttagccagtaaacttgtataggatgtgatgtgtccagtcctttgggcaagatgccccaccctttttaatgaggaggagggggcattttaaaccaccaagggaaaatattgagcatattgaatgtgaaacttctgattcttcaattacattatttttcccccagggataaaaaggagggcactctctctatcagaagggcggtgtcacgtgaagtgcagctggtgcgggtggtggagaggccaagcctttcg

SEQ ID NO: 5201 - DNA, 141 bp, Homo sapiens
  misc_feature 1..141: note = U/M: M (0.63:0.21) in Smooth Muscle cells
  misc_feature 1..141: note = source = chr2:220406860-220407000; Gene: CHPF (intron)
  source 1..141: mol_type = genomic DNA
cgccaccagcagcctctgcctgatgcccagctccgtgctgatgtagcgggtcctaggggaggagatggcacaagcttatcaaaaggacaacggggcggggggtgggggggaggtggtcagcacagaccctggcaggtcacg

SEQ ID NO: 5202 - DNA, 54 bp, Homo sapiens
  misc_feature 1..54: note = U/M: M (0.64:0.27) in Smooth Muscle cells
  misc_feature 1..54: note = source = chr6:32064206-32064259; Gene: TNXB (intron)
  source 1..54: mol_type = genomic DNA
cggccccggccacgacagtccccaggacagctgcgcacaccgcagtcctcgccg

SEQ ID NO: 5203 - DNA, 235 bp, Homo sapiens
  misc_feature 1..235: note = U/M: M (0.57:0.21) in Smooth Muscle cells
  misc_feature 1..235: note = source = chr14:104312591-104312825; Gene: PPP1R13B (intron)
  source 1..235: mol_type = genomic DNA
cgttaaaaacggggagaagagattatcaagagaaaggaaatcaaagaggaagaagggggatctaatctaaatgtccttgggtgcagcatagcagaatggcaatattcaagtagagaatgcagggaaactgcactttcctgtgaaatgtgattttcaacgtagtattgtaggttaaaaaaatgactgtgttactttactataaacgtgtttgagaattttacttacgatataggcg

SEQ ID NO: 5204 - DNA, 39 bp, Homo sapiens
  misc_feature 1..39: note = U/M: M (0.64:0.3) in Smooth Muscle cells
  misc_feature 1..39: note = source = chr6:32064082-32064120; Gene: TNXB (intron)
  source 1..39: mol_type = genomic DNA
cgggttgcacacgcagcggccatccacgcagcgcccgcg

SEQ ID NO: 5205 - DNA, 103 bp, Homo sapiens
  misc_feature 1..103: note = U/M: M (0.68:0.14) in Smooth Muscle cells
  misc_feature 1..103: note = source = chr2:74776766-74776868; Gene: LOXL3 (intron)
  source 1..103: mol_type = genomic DNA
cgccgcccttaaggaaccctgcttggtgtgcctgctgtaaacccagtggcgggatgggcccgaggcggcgctgagagagcggccacgatggccgcagtccgcg

SEQ ID NO: 5206 - DNA, 236 bp, Homo sapiens
  misc_feature 1..236: note = U/M: M (0.69:0.21) in Smooth Muscle cells
  misc_feature 1..236: note = source = chr8:72916545-72916780; Gene: LOC100132891 (intron)
  source 1..236: mol_type = genomic DNA
cgtcgttgctcccttcccttcccctccaacccagctggtagttgggtatactcactgcatccagtttggcagcaacgtgccacgggttacagacccttatctccaatggtagtctgtaaagggttaacaacaggggctctgggggaagaccaggtttgtgacatttgctgatttcagtgatctaagtataatcaccttacctgattttaagtacggttgtttgtttgcaacaaccg

SEQ ID NO: 5207 - DNA, 141 bp, Homo sapiens
  misc_feature 1..141: note = U/M: M (0.66:0.21) in Smooth Muscle cells
  misc_feature 1..141: note = source = chr8:72758068-72758208; Gene: LOC100132891 (intron)
  source 1..141: mol_type = genomic DNA
cgtacagcagaacaaatgcgtccagctcgatggctgaagtgctgcaacaggtggctggcagaggctgacttcatcactcaggcatcattccaccttagtctcccaggccacgctacccttagcaggggcgttttggggccg

SEQ ID NO: 5208 - DNA, 422 bp, Homo sapiens
  misc_feature 1..422: note = U/M: M (0.73:0.11) in Smooth Muscle cells
  misc_feature 1..422: note = source = chr20:3653350-3653771; Gene: ADAM33,ADAM33 (intron,exon)
  source 1..422: mol_type = genomic DNA
cgggcgagccgacttaacctggccagggccgcagtcacactcctcgcccgcttccacgaagccgttcccgcagagcgccggcggcaccgggagtccggggtccggggcattggagaggcaagcgccgccccccttgcggaagaaggcgcgcagctggcggcggctgcaggcgctgaacacgcgcggaaacgggtgcctaccggcacggggagggcattgggcatggagggacagtcccccaacccccgcgcttctctgatccccacccctgggcttggctacagccgccagacgcgcagagcccagagaggggaagtaacccgcgcaaagtcacacaacaagcgggacaggggacgatgcggccccaatagtgagcagcccgggacccaaggtggaatcgcgacccgacggtgctcctcccg

SEQ ID NO: 5209 - DNA, 98 bp, Homo sapiens
  misc_feature 1..98: note = U/M: M (0.74:0.21) in Smooth Muscle cells
  misc_feature 1..98: note = source = chr19:49939989-49940086; Gene: SLC17A7,SLC17A7 (exon,intron)
  source 1..98: mol_type = genomic DNA
cgtggtcaccgggcgcccatccgcactcagctccagcgtctccgcgccttcctgccgcttctccagaaggctgcgggacagcaagagccagagactcg

SEQ ID NO: 5210 - DNA, 324 bp, Homo sapiens
  misc_feature 1..324: note = U/M: M (0.71:0.19) in Smooth Muscle cells
  misc_feature 1..324: note = source = chr16:85206120-85206443; Gene: LOC400548 (Intergenic)
  source 1..324: mol_type = genomic DNA
cgaggagccagacggggctcagttaatttgggatccggctttgcaagggaccaagcaggaactgcccccggtgggtctggggaggtagatgtaggcgtctgtgagtggcagtcaccaacccggccaccggggcatggatgctcatttctgccaaagacagtcagtgcgacttgttttaatcaaacgcctgtagtggcagctgctggccatgtgtgggcagagggacgtgtggatgggaaaggtggcgctgtcgtgttcagaaagggtcattccaccctttgaaagcttcctgatcctgcctcccacctgcacgtgtggggcacg

SEQ ID NO: 5211 - DNA, 78 bp, Homo sapiens
  misc_feature 1..78: note = U/M: M (0.73:0.22) in Smooth Muscle cells
  misc_feature 1..78: note = source = chr20:3653926-3654003; Gene: ADAM33,ADAM33 (intron,exon)
  source 1..78: mol_type = genomic DNA
cgaccaaagaaacgcagcggaggaagtccccaggactagccgccccgccgcagccccgaccccccacccgcgtacccg

SEQ ID NO: 5212 - DNA, 250 bp, Homo sapiens
  misc_feature 1..250: note = U/M: M (0.62:0.14) in Smooth Muscle cells
  misc_feature 1..250: note = source = chr13:28000309-28000558; Gene: GTF3A (intron)
  source 1..250: mol_type = genomic DNA
cggtgtgctgtattttggatactggcgctaccagtttccttaatacaggttgaaaaacttggagtcatctttgttgtcccagatctctcatgcagattaatttgacaaatgtttattgagcctactccacgcctgccgctgtgcaaggttctgtggctccgcccctggtggtatgtagctcactgtgttcctgtttgcttgttttgctcctagtactctcatggaggcctcggtgcctccctcctggacg

SEQ ID NO: 5213 - DNA, 64 bp, Homo sapiens
  misc_feature 1..64: note = U/M: M (0.66:0.19) in Smooth Muscle cells
  misc_feature 1..64: note = source = chr13:33589940-33590003; Gene: KL (promoter-TSS)
  source 1..64: mol_type = genomic DNA
cgcgggtgggcgcgtctccccgcgagcatctcacctaagggggaatccctttcagcgcacggcg

SEQ ID NO: 5214 - DNA, 132 bp, Homo sapiens
  misc_feature 1..132: note = U/M: M (0.61:0.14) in Smooth Muscle cells
  misc_feature 1..132: note = source = chr6:134175377-134175508; Gene: MGC34034 (TTS)
  source 1..132: mol_type = genomic DNA
cggttccatatcttccagccccgcactcatgattcacagtaatgcctagtgttagcactcactaatcgacaatttgatggggaaggtgaggaggaaaacgaccctggaagcagagtgctggtttcacacccg

SEQ ID NO: 5215 - DNA, 338 bp, Homo sapiens
  misc_feature 1..338: note = U/M: M (0.67:0.22) in Smooth Muscle cells
  misc_feature 1..338: note = source = chr19:10077107-10077444; Gene: COL5A3,COL5A3 (exon,intron)
  source 1..338: mol_type = genomic DNA
cgcagagccaggcagggtgggtgagtccggatgggacccgacggaccccaaccccccccacacccccactccgcccatccaagtggcggggggaccggacctcaccatcaggcaggtgcgggtggttgcggtgcagctcgtggcacacgaggcccgggcgctccgcagtgccgggaggacgccgcagctgctccagctccaagctcagcgatgtgagcgaggccagcacctcctccaggccgccctccacgactggaagcgggactgggacgaagcgccggcgcctgcgcagcccatgcagctcggcaggggcaccctgggcgtaggggatggggacg

SEQ ID NO: 5216 - DNA, 463 bp, Homo sapiens
  misc_feature 1..463: note = U/M: M (0.56:0.12) in Smooth Muscle cells
  misc_feature 1..463: note = source = chr9:71735533-71735995; Gene: TJP2 (promoter-TSS)
  source 1..463: mol_type = genomic DNA
cgattaagcactaagttcccattcccttcccagggtttttaacaaggccacgttaaacagaaggggcacctgcttgccaggtggaggcctgggcactggcagggttctgccctcccgactgagcaggggctcccgaggtgactaagcaggctctctgggtagtgctcccgccctcacctattgtccgggtggaggaaccggtatttccggatgggggcctcagacccagtgatcccggctaagggtgaggctggcgggggaggggaacggaagcgggtcgtaaaagttaactttacactaaaatcattaacttttctcacaccccccaataaaagcagtcacctcccccccccaagagccccccacgcacccacagtggcccacaaccatgcttcccgggggctttgaagggtagaggagctgacatcctccttgcccagaccctggaaaggattaggaagcg

SEQ ID NO: 5217 - DNA, 219 bp, Homo sapiens
  misc_feature 1..219: note = U/M: U (0.03:0.95) in Thyroid Epithelium
  misc_feature 1..219: note = source = chr5:77841405-77841623; Gene: LHFPL2 (intron)
  source 1..219: mol_type = genomic DNA
cgttcatcttgtttaaaaagacttggtgtgatgcgtggaggccgatcattcgagccacctggatgtgctgtgaaatagtttctcaagcagtcccagcttttccaaatgcacctatcaaaacaaacctaagtgcctgttaaattcactctttaggagacctactttgttccaacagagtcaactgaccgaagataactttctgcagaatctaagacactc

SEQ ID NO: 5218 - DNA, 50 bp, Homo sapiens
  misc_feature 1..50: note = U/M: U (0.04:0.95) in Thyroid Epithelium
  misc_feature 1..50: note = source = chr12:111696042-111696091; Gene: CUX2 (intron)
  source 1..50: mol_type = genomic DNA
cgcggtggctcacgcgtgtaatcccagcaccttgggaggccaaggcgggc

SEQ ID NO: 5219 - DNA, 198 bp, Homo sapiens
  misc_feature 1..198: note = U/M: U (0.04:0.95) in Thyroid Epithelium
  misc_feature 1..198: note = source = chr2:204339659-204339856; Gene: RAPH1 (intron)
  source 1..198: mol_type = genomic DNA
cgccatctctactaaaaatacaaaaattagccaggtgtggtgaagcacacttgtagtcgcagctacttgggacgctgaggcgggagaatcgtttgaacccaggaggcagagattgcagtgagccgagatggcaccactgtactacagcttgagcaacagagcaagactgcatcttaaagaaataaaatatggccgggc

SEQ ID NO: 5220 - DNA, 480 bp, Homo sapiens
  misc_feature 1..480: note = U/M: U (0.03:0.93) in Thyroid Epithelium
  misc_feature 1..480: note = source = chr6:155278118-155278597; Gene: TIAM2 (Intergenic)
  source 1..480: mol_type = genomic DNA
cgcggaggaagactcatgaagggagttgaaggagcaaagcaccagaacccttccagccctgagagtctgtgagtctatgaggcccatgggtgtccaaggatgtgaactgttatgatagttctagaaatggaaagaacagctactgaataattatcagtaattattgcttttcacctaaaatgtgtaatgcagcttccaaaattactgacttggctgagcacagtggctcgcacgtgtaatcccagcactttaggaggctgagttgggcaggtcacttgagcttaggagtttgagaccagcctgggcatcatagtgggaacttgtctctacaaaaaatacaaaaattagccaagcatggtggcacgtacctgtagtcccagctgcttggaaagctgaggcgggaggatcttataaacccaagaggcagagactacagtgagccgtgatcgtgccactgcattccagcctaggtgacagagc

SEQ ID NO: 5221 - DNA, 175 bp, Homo sapiens
  misc_feature 1..175: note = U/M: U (0.05:0.95) in Thyroid Epithelium
  misc_feature 1..175: note = source = chr17:26526466-26526640; Gene: PYY2 (Intergenic)
  source 1..175: mol_type = genomic DNA
cggatcacctgaggtcaagagttcgagaccaccctggccaaaatggtgaaaacccgtctctactaaaaacacaaaaattagccaggcgtggtgatgggcgcctatagttccagctactcagaagactgcggcaggagaatcacttgaacccaggaggtagaggttgcagtgatcc

SEQ ID NO: 5222 - DNA, 78 bp, Homo sapiens
  misc_feature 1..78: note = U/M: U (0.05:0.94) in Thyroid Epithelium
  misc_feature 1..78: note = source = chr17:31291836-31291913; Gene: SPACA3 (Intergenic)
  source 1..78: mol_type = genomic DNA
cgaagcgagtgcagagtcccaatccgcagttccattctcctgcaagggaaatggccggagatggatgaagtgattttc

SEQ ID NO: 5223 - DNA, 238 bp, Homo sapiens
  misc_feature 1..238: note = U/M: U (0.05:0.94) in Thyroid Epithelium
  misc_feature 1..238: note = source = chr12:132468369-132468606; Gene: EP400 (intron)
  source 1..238: mol_type = genomic DNA
cgcacaccactacacctggctgatttttgtattgttgtagagatgggatttcgccatgctgcccaagctacaagtgctttttctttttttttttttagacggagtttcgctcttgttacccaggctggagtgcagtggcccgatctcggctcaccacaacctctgcctcctgggttcaagcgattctcctgcctcagctcccgagtagctgggattataggcatgttgccaccatgcc

SEQ ID NO: 5224 - DNA, 257 bp, Homo sapiens
  misc_feature 1..257: note = U/M: U (0.08:0.96) in Thyroid Epithelium
  misc_feature 1..257: note = source = chr3:196643735-196643991; Gene: SENP5 (intron)
  source 1..257: mol_type = genomic DNA
cgactcacacctgtaatcccagcattttgggaggcctaggtgggtagatcacttgaggcaaggagtttgagacaaacctggccaacatggcaaacccccatctctactaaaaatacaaaaattagccgggcgtggtgacacaggtctgtaatcccaggtatgcagaacgctgaagcacaagaatcgcttgaacctgggagacagaaattgcagtgagccaagatcatgccattgcactccagcctgggcaacagagc

SEQ ID NO: 5225 - DNA, 94 bp, Homo sapiens
  misc_feature 1..94: note = U/M: U (0.07:0.94) in Thyroid Epithelium
  misc_feature 1..94: note = source = chr11:64524521-64524614; Gene: PYGM (intron)
  source 1..94: mol_type = genomic DNA
cgagtagctgggactacaggcgcacaccatcacgcctggctaatttttgtattttttgtagacggggtttcgccctcttgtccaggctggtctc

SEQ ID NO: 5226 - DNA, 199 bp, Homo sapiens
  misc_feature 1..199: note = U/M: U (0.08:0.93) in Thyroid Epithelium
  misc_feature 1..199: note = source = chr6:52807841-52808039; Gene: GSTA3 (Intergenic)
  source 1..199: mol_type = genomic DNA
cgcttagctaatttttgtatttttagtagagacagggttacagcgtgaggtgtgagccactgcgccaggccaagaatggttttttttttttttttgagacggagtcactatgtcaccaggctggagtgcagtggtgctatcccggcgcactgcaacctccgcctcctgggttcaagtgattctcccgcctcaccctccc

SEQ ID NO: 5227 - DNA, 261 bp, Homo sapiens
  misc_feature 1..261: note = U/M: U (0.07:0.92) in Thyroid Epithelium
  misc_feature 1..261: note = source = chr5:153692596-153692856; Gene: GALNT10 (intron)
  source 1..261: mol_type = genomic DNA
cggtggctcatgcctttaatcccaacactttgggaggccgaggcaggtggatcacttgaggtcaggagctcgagaccagcctggccaacatggtgaaaccacatctctacgaaaaatacaaaaattagccgggcgtgatggtgagtgcctcatagtcccagctacttaggaagctgaggcaggagaattgcttcaacctgggaggcagaggttgcagtgagttgaaatcacatcactgcactccagcctgggtgacagagc

SEQ ID NO: 5228 - DNA, 428 bp, Homo sapiens
  misc_feature 1..428: note = U/M: U (0.1:0.95) in Thyroid Epithelium
  misc_feature 1..428: note = source = chr1:226442408-226442835; Gene: LIN9 (intron)
  source 1..428: mol_type = genomic DNA
cgagaccatcctggctaacacggtgaaaccccatctctactaaaaatacaaaaaattagccgggcgtagtggagggtgactgtagtcccagctactcgggaggctgaggcagaagaatggcgtgaacccggaaggcggagcttgcagtgagctgagatcgtgccactacactcttgcctgggcgacagagcgagactctgtctcaaaaaaaaaaaaaaaaaaaaaagtcaacgacacttcttagatctctaagaaaattgagggccaaggcaaactgttcacaaaattggaaagaatgaaaggcaagtatgtagaatcacaatttactggagcagaaacccatgagcaaaaacctctaggaaccagtgcttgggtagggaaaactgaactgtaatatatgtggtaggtgcattaagcatttactctac

SEQ ID NO: 5229 - DNA, 62 bp, Homo sapiens
  misc_feature 1..62: note = U/M: U (0.11:0.95) in Thyroid Epithelium
  misc_feature 1..62: note = source = chr1:151742357-151742418; Gene: OAZ3 (intron)
  source 1..62: mol_type = genomic DNA
cggccaacacagcgaaaccccgtctccaccaaaatacgaaaaccagtcaggcatggcggcac

SEQ ID NO: 5230 - DNA, 160 bp, Homo sapiens
  misc_feature 1..160: note = U/M: U (0.13:0.94) in Thyroid Epithelium
  misc_feature 1..160: note = source = chr18:60492252-60492411; Gene: PHLPP1 (intron)
  source 1..160: mol_type = genomic DNA
cgggttcaagtgattgtcctccctcagtctcccgggttcaagtgattgtcctccctcagtctcccgagtagctaggactatgggcgcctgccaccacgcctgaataatttttgtatttttagtagagacggggtttcgccatcttggccaggctggtctc

SEQ ID NO: 5231 - DNA, 141 bp, Homo sapiens
  misc_feature 1..141: note = U/M: U (0.02:0.94) in Thyroid Epithelium
  misc_feature 1..141: note = source = chr16:87460982-87461122; Gene: ZCCHC14 (intron)
  source 1..141: mol_type = genomic DNA
cgtactcggagcagtcagtgttgcttggggtatgaacttttttttctttttgagacagagttttgctctgctgcccaggctggagtgcagtggcgcgatctcagctcactgcaaccaacctccgcctcccgggtttaagcg

SEQ ID NO: 5232 - DNA, 278 bp, Homo sapiens
  misc_feature 1..278: note = U/M: U (0.03:0.94) in Thyroid Epithelium
  misc_feature 1..278: note = source = chr12:64410229-64410506; Gene: SRGAP1 (intron)
  source 1..278: mol_type = genomic DNA
cgcgctgcagcctgggtgacagagcgagaccctgtctccaaaaacaaaaaagtgctttctcaaaattaaacttgttgtgagtcacattgtaactttgggcagagggagttaatttcccctttggtttctaagttagctttttgggaatcacactgtaaaatgtcatgatctagttcatctttaatggtccttagttctgcaactcaacttttaagcaagcatgacgcttcaacctgcttactttttctctctttttggtaaagtctgtttggatggcg

SEQ ID NO: 5233 - DNA, 324 bp, Homo sapiens
  misc_feature 1..324: note = U/M: U (0.05:0.94) in Thyroid Epithelium
  misc_feature 1..324: note = source = chr7:110671964-110672287; Gene: IMMP2L (intron)
  source 1..324: mol_type = genomic DNA
cgctatgaccatgaaaaacaccagagattttttttttttttttttttttgagacagggtctcactctgtcaccgaggctggagtgcagtggtgcgacttcagctcactgcaacctccgcctcctgggctgaagcagtcatcccacctcagccacccaagtagctggaacgacaagtgggcatgaccatgcctggctaatttttttgtatttttagtagagacaaggtttcgctatgttgcctaggcagatctcaaacttctgggcttaaggtatccgcctatcttggcctcccacagtgctgggattacaggcatgagccaccg

SEQ ID NO: 5234 - DNA, 419 bp, Homo sapiens
  misc_feature 1..419: note = U/M: U (0.03:0.91) in Thyroid Epithelium
  misc_feature 1..419: note = source = chr11:86500271-86500689; Gene: PRSS23 (Intergenic)
  source 1..419: mol_type = genomic DNA
cgggattcagcaagttgtagtggatcagactggcagcagaccaccaaacagtgaccatgaccttttttggtgcaagtttggctttgggaagtgctttggagtgagaagaatctagttccaaccactgagctggtcatcatcagttgtcatatgaaatccacttttgtcgcacatcacaatccaatcaagaaatggtttgttgttgttgcatagaataagatgacgcttcaaaacgacatttttttttctcagctcatgaggcacctatgagtgggtacttattgagctttttcacctctccaatttgcttcaaatgccaaacaaccatagaatggtagatgttgagtttttcagcaacttctcgtgttgttttaagaggttcagcttcaatgactgctctcggttgttgtcaacttccg

SEQ ID NO: 5235 - DNA, 471 bp, Homo sapiens
  misc_feature 1..471: note = U/M: U (0.04:0.92) in Thyroid Epithelium
  misc_feature 1..471: note = source = chr1:10441602-10442072; Gene: KIF1B (TTS)
  source 1..471: mol_type = genomic DNA
cgtcacggagctgttagtgaacgaggtaaaaataataaaggtacagccagtgcatcagaaggttctcgatgtgcatttattcttgcaccccttgaaaggtaattgcacaaagatttcttttcttgatttgcaaagataatacctttctaagacagaagtcacgatatcatcgcttaagtattcctttctgatattcaaaatcgtggtttttatataaccaagaaagctaatatggtgctgtttctttgaaagtacttttctcccaaagatgtaagtggttattttagctagaagatttgttgtttttctcctgaagcctccttgtatgccttccaataattctgtagtgttgtgttggcttctttttttttttttttttctttttgagacagagtcttgctctgtcacccatgctggagtgcagtgatgtgatctcgggtcactgcaacctctgcctcctgggttcaagcg

SEQ ID NO: 5236 - DNA, 137 bp, Homo sapiens
  misc_feature 1..137: note = U/M: U (0.05:0.92) in Thyroid Epithelium
  misc_feature 1..137: note = source = chr9:132811819-132811955; Gene: GPR107 (Intergenic)
  source 1..137: mol_type = genomic DNA
cgtctccacaaaaaaatacaaaaattagcccggcacggttgtgcttagctacttgggggcttgaggcagtaggatcgcttgagcctgggagttggaagctgcagtgagccgtgattgcaccaccgcactccagcccg

SEQ ID NO: 5237 - DNA, 231 bp, Homo sapiens
  misc_feature 1..231: note = U/M: U (0.06:0.93) in Thyroid Epithelium
  misc_feature 1..231: note = source = chr10:79598984-79599214; Gene: DLG5 (intron)
  source 1..231: mol_type = genomic DNA
cgcagtggttcaggcctgtaatcctagcactttgggaggccaaggtgggtggatcacctgaggtcaggaattcgagactagcctggccaacagagcgaaaccccgtctctactaaaaatacaaaaattagctgggcgtactggcaagtgtctataatcccagctactcaggaggctgaggcaagaggatcgctggaacccggcaggtggaggttgtagtgagccgagatcg

SEQ ID NO: 5238 - DNA, 368 bp, Homo sapiens
  misc_feature 1..368: note = U/M: U (0.02:0.89) in Thyroid Epithelium
  misc_feature 1..368: note = source = chr2:113489730-113490097; Gene: CKAP2L (Intergenic)
  source 1..368: mol_type = genomic DNA
cgcctgcctcggcctcttaacgtgtagggattacaggcgagagccaccgagcctggcatttttttttttaaaacatcttctttgcatttcagaagcttccaggtttgacactgccaaggccttttcttcctttccctggtttgactttcaggtcccagagcctgcaggggcaggttctccagtaaatcccaggtctcactggcctgtgtctttacaggggcaggttctccagtaaatcccaggtctcactggcctgtgtctttacaggggcaggttctccagtaaatcccaggtctcactggcctgtgtctttacaggggcaggttctccagtaaatcccaggtctcactggcctgtgtctttaaacg

SEQ ID NO: 5239 - DNA, 174 bp, Homo sapiens
  misc_feature 1..174: note = U/M: U (0.06:0.92) in Thyroid Epithelium
  misc_feature 1..174: note = source = chr8:16642556-16642729; Gene: FGF20 (Intergenic)
  source 1..174: mol_type = genomic DNA
cgcgctgccttaagagctgtaacactcaccgcgaaggtctgcagcttcactactgagccagcgagaccacgaacccaccagaaggaaaaaactccaaacacatctgaacctcagaagggacagactccagacgcgccaccttaagggctgtaacactcaccgccagggtccgcg

SEQ ID NO: 5240 - DNA, 176 bp, Homo sapiens
  misc_feature 1..176: note = U/M: U (0.04:0.9) in Thyroid Epithelium
  misc_feature 1..176: note = source = chr2:26854285-26854460; Gene: CIB4 (intron)
  source 1..176: mol_type = genomic DNA
cgagctgtgatcgcactactgcactccagcctgggcgacagagcaagaccccgtctcaataaacaacaaaaactaggtgaagaatttggagggtgattttaggagtggagactcagaggtagagcaggaagcaggaggctctcccagagccctgacgatggtaggtggaggcctcg

SEQ ID NO: 5241 - DNA, 177 bp, Homo sapiens
  misc_feature 1..177: note = U/M: U (0.01:0.87) in Thyroid Epithelium
  misc_feature 1..177: note = source = chr7:68364312-68364488; Gene: AUTS2 (Intergenic)
  source 1..177: mol_type = genomic DNA
cgcaccacttcactccagcctgggtgacaaagtgagaccctgtctcaaaaaaaataaaattaacttcaacataagagtcactttgggccggacgcaatggctcacggctgtaatccagcactttgggaggccgaggcaggtggatcatgaggtcaggagtttaagaccagcctgccg

SEQ ID NO: 5242 - DNA, 305 bp, Homo sapiens
  misc_feature 1..305: note = U/M: U (0.07:0.93) in Thyroid Epithelium
  misc_feature 1..305: note = source = chr1:9373886-9374190; Gene: SPSB1 (intron)
  source 1..305: mol_type = genomic DNA
cggagaggcgagatggctggggatctcgaatctcctgcttttccctataggagtgaacaagacaactggccaggcgctgtggctcacgcctgtaatcccaacattttgggaggcctaggcgggcggatcacttgaggtcaggagcttgagaccagcctggccaacatggtgaaatcccttttccactaaaaatacaaaaattagccaggtgtggcggcgggcacttgttatcccagctacctgggaggctgaggcaggagaattgcttgaaccaaggaggcagaggttgcagtgagctgagatcg

SEQ ID NO: 5243 - DNA, 175 bp, Homo sapiens
  misc_feature 1..175: note = U/M: U (0.02:0.87) in Thyroid Epithelium
  misc_feature 1..175: note = source = chr8:133881917-133882091; Gene: TG (exon)
  source 1..175: mol_type = genomic DNA
cggcatgtggctttgggggcccatcccagggtcacctggtctgtgtctcctcctcaggactgtccagtgccagaacgacggccgctcctgctggtgtgtgggtgccaacggcagtgaagtgctgggcagcaggcagccaggacggcctgtggcttgtaagtgggagtgggggacg

SEQ ID NO: 5244 - DNA, 200 bp, Homo sapiens
  misc_feature 1..200: note = U/M: U (0.05:0.9) in Thyroid Epithelium
  misc_feature 1..200: note = source = chr10:78833441-78833640; Gene: KCNMA1 (intron)
  source 1..200: mol_type = genomic DNA
cgggcatcagaatcacctgtacagtttctgaaaacacagattgctggccccccaccagcatttctgattcagtagatctggggtaaggctggagaatttggcatttctcacaagttggaggtgacgctgacgctgttgatctaggggccacactttgagaaccactggcctaaaacatcaggtaaatcacagtgtcgacg

SEQ ID NO: 5245 - DNA, 269 bp, Homo sapiens
  misc_feature 1..269: note = U/M: U (0.06:0.91) in Thyroid Epithelium
  misc_feature 1..269: note = source = chr2:9471561-9471829; Gene: ASAP2 (intron)
  source 1..269: mol_type = genomic DNA
cggaatctagaagtagggcattataacattataaaataaagacagccatggtttggcaaggcatggtggctcatgcctgaaatcccagcactttgggaggccaaggggggcggatcacctgaggtcaggagttcaagaccagcctggccaacatggtgaaacctggtctctactaaaaatacaaaaattagccggatgcggtagtgcacacctgtagtcccggctactcgggagactgaggctggagaatcacttgaacccaagaggcg

SEQ ID NO: 5246 - DNA, 66 bp, Homo sapiens
  misc_feature 1..66: note = U/M: U (0.06:0.9) in Thyroid Epithelium
  misc_feature 1..66: note = source = chr9:138170740-138170805; Gene: C9orf62 (Intergenic)
  source 1..66: mol_type = genomic DNA
cgaaaggccaccacccagcctgctttgaatgcacacagcacagaaaacgcctcggtccgccaggcg

SEQ ID NO: 5247 - DNA, 140 bp, Homo sapiens
  misc_feature 1..140: note = U/M: U (0.08:0.92) in Thyroid Epithelium
  misc_feature 1..140: note = source = chr1:18058726-18058865; Gene: ACTL8 (Intergenic)
  source 1..140: mol_type = genomic DNA
cgtgcgtgatggtgcgcgcctgtaatcccagctactcgagaggctgaggcaggagaatcgcttgaacccggtaggcggaggttgcagtgagccaagatcgcaccactgcactctagcctgggcaacagagcgagacttcg

SEQ ID NO: 5248 - DNA, 143 bp, Homo sapiens
  misc_feature 1..143: note = U/M: U (0.06:0.9) in Thyroid Epithelium
  misc_feature 1..143: note = source = chr1:55372143-55372285; Gene: DHCR24 (Intergenic)
  source 1..143: mol_type = genomic DNA
cgggtgtggtggctcatgcctgtaattccagcactttgggaggctgaggcaggcggatcacctgagatcaggagttcgagaccagcctggcgaacatggagaaaccccgtccctactaaaaatacaaaaattagccaagcacg

SEQ ID NO: 5249 - DNA, 203 bp, Homo sapiens
  misc_feature 1..203: note = U/M: U (0.05:0.89) in Thyroid Epithelium
  misc_feature 1..203: note = source = chr9:138073725-138073927; Gene: LOC401557 (exon)
  source 1..203: mol_type = genomic DNA
cgtggctagaataaatcaggcagaggaaggtggaaggactggacttgctgagtcttccggccttcaactttctcccgtgctggatgcgtcctgccctcgaacatcggactccaagtccttcagcttttcagctcttgcatttacaccagtggtttttcaagggctctcgggcctttggccgcagactgaaggctgcactgccg

SEQ ID NO: 5250 - DNA, 265 bp, Homo sapiens
  misc_feature 1..265: note = U/M: U (0.02:0.86) in Thyroid Epithelium
  misc_feature 1..265: note = source = chr13:53475567-53475831; Gene: PCDH8 (Intergenic)
  source 1..265: mol_type = genomic DNA
cggctcactgtaacctctgcctcccaggttcacgccattctcctgcctcagccttctgagtagctgggactacaggcggccctccaccacgcccggctaatttttttgtattttcagtagagatggggtttcaccgtgttagccaggatcgtctcaatctcctgacctcgtgatctgcccgcctcggcctctgaaagtgctgagattacaggtgtgagccactgcgcccggcccacctgatcgtgttttagatatttatcttacg

SEQ ID NO: 5251 - DNA, 161 bp, Homo sapiens
  misc_feature 1..161: note = U/M: U (0.03:0.86) in Thyroid Epithelium
  misc_feature 1..161: note = source = chr17:2944952-2945112; Gene: OR1D5 (Intergenic)
  source 1..161: mol_type = genomic DNA
cgctctgaccaaccttcggtgtcccctggttctattctaacaacaacattgcggtccagttccctaagcttgcagtgatcctcagttaatacaacagttattacaacagtctcttgtgtgttcagacgcagccctgtttgtggtaaacttcacattccacg

SEQ ID NO: 5252 - DNA, 241 bp, Homo sapiens
  misc_feature 1..241: note = U/M: U (0.08:0.91) in Thyroid Epithelium
  misc_feature 1..241: note = source = chr15:58701798-58702038; Gene: LIPC (Intergenic)
  source 1..241: mol_type = genomic DNA
cggctgggcacgatggctcatgcctgtaatctcagcactttgggaggccgaggtgggtggatcacttgagatgaggagtttgaggccagcctggccaacatggtagaacaccgtctctactaaaaatacaaaaattagccgggtgtggtggtgtgtgtctgtagtcccagctaagcaggaggctgaggcaggaaaatcacttgaacctaggaggtggaggttgcagtaagccaagatcgcg

SEQ ID NO: 5253 - DNA, 263 bp, Homo sapiens
  misc_feature 1..263: note = U/M: U (0.06:0.89) in Thyroid Epithelium
  misc_feature 1..263: note = source = chr1:113270906-113271168; Gene: FAM19A3,FAM19A3 (TTS,Intergenic)
  source 1..263: mol_type = genomic DNA
cgatggtgggctcatggggtggggtaggtagggagttggtcaaagatcgtcccctctcccctctcccctctcccctctcccctctcccctctcccctctcccctcttccctcttccctcttccctctcctgccatgatctcagctcgctgcaacctccctgcctcggactcccgtgattggcctgccgagtgcctgggattgcaggcacgcgccgccacacctgactggtttttgtatttttggtggagacggggtttcgccg

SEQ ID NO: 5254 - DNA, 158 bp, Homo sapiens
  misc_feature 1..158: note = U/M: U (0.08:0.9) in Thyroid Epithelium
  misc_feature 1..158: note = source = chr3:184270869-184271026; Gene: EPHB3 (Intergenic)
  source 1..158: mol_type = genomic DNA
cgcccggccagggtaagtcattcttaacattttagcatccacagccgttcctcggcacagccttgcctggcctcccaagaatgttttcataggctcccacacttttccaggacaggacttcttaccttgcaataacaaaatcatgtccgtgacgatcg

SEQ ID NO: 5255 - DNA, 221 bp, Homo sapiens
  misc_feature 1..221: note = U/M: U (0.07:0.89) in Thyroid Epithelium
  misc_feature 1..221: note = source = chr10:131658341-131658561; Gene: EBF3 (intron)
  source 1..221: mol_type = genomic DNA
cgctttattctgcacttcaggtgatcacacttattttgttctaaatggtctgctgctcttctcccacagtcccacaccatctcctggacccactccaagctgttttcagaagcacgtcctactcaatcagaaactcaaaagtccggagtgtgatcccgctctacccccgactctcctccctgcagcaccgagaaggaccatcgcaaggtgggtgaggagcg

SEQ ID NO: 5256 - DNA, 216 bp, Homo sapiens
  misc_feature 1..216: note = U/M: U (0.13:0.94) in Thyroid Epithelium
  misc_feature 1..216: note = source = chr3:42085691-42085906; Gene: ULK4 (Intergenic)
  source 1..216: mol_type = genomic DNA
cgcccaggctggagtgcagtggcacaatcacagctcactgcaacctctgcctgtcaggctcaggcaatcctcccacctcaacctccctagtagctggaaccacaggtgcacaccaccacacttggctaattttttgtattcttggtagagacagggtttcaccgtgctacccgggctggtctcgaactcctgagctcaagagatccacttgcctcg

SEQ ID NO: 5257 - DNA, 255 bp, Homo sapiens
  misc_feature 1..255: note = U/M: U (0.11:0.92) in Thyroid Epithelium
  misc_feature 1..255: note = source = chr17:17737018-17737272; Gene: SREBF1 (intron)
  source 1..255: mol_type = genomic DNA
cgggcatggtggttcatgccctgtaatcccagcacttttgagaggctgaggtgggcagatcacctgagctcaggagttcgagaccagcctggccaacatggccatctctactaaaaatacaaaatttaaccaggcgtggcggtgcatgactgtaatcccagctacttgggagctggagaatctcttgaacctgagaggcagagtttgcagtgagctgagatcatgccactggactacagcatgggcaaaagagcg

SEQ ID NO: 5258 - DNA, 170 bp, Homo sapiens
  misc_feature 1..170: note = U/M: U (0.08:0.88) in Thyroid Epithelium
  misc_feature 1..170: note = source = chr7:1184393-1184562; Gene: C7orf50 (Intergenic)
  source 1..170: mol_type = genomic DNA
cgggtggaccacctgaggtcagcagttcgagaccaacctgaccaacatggcaaaaccccgtctctactaaaaaatacaaaaattagccgggcgcgatcgcgggcgcctgtgatcccagctacttgggagggggaggctgagacatgagaatagcttgaactcaggaggcg

SEQ ID NO: 5259 - DNA, 265 bp, Homo sapiens
  misc_feature 1..265: note = U/M: U (0.06:0.86) in Thyroid Epithelium
  misc_feature 1..265: note = source = chr8:101059069-101059333; Gene: RGS22 (intron)
  source 1..265: mol_type = genomic DNA
cgcctcactctgtcgcccaggctagagtgcagtgaaatgaccttggctcactgcaactctgcctcccgggttcaagtgattcttatccctcagccttccgagtagttgatactacaggcacgtgccaccacactcggctaattttttaaaacttttgtagagacatgatctcagtatattacctaggctggtctcaagctcctaggctcaagcaatctgcctgccctggtctccaaaatgctgcgattacagctctgagccaccg

SEQ ID NO: 5260 - DNA, 289 bp, Homo sapiens
  misc_feature 1..289: note = U/M: U (0.1:0.9) in Thyroid Epithelium
  misc_feature 1..289: note = source = chr14:97398487-97398775; Gene: VRK1 (Intergenic)
  source 1..289: mol_type = genomic DNA
cgttcaggtgaagtccctccacatccactgaccactgggctatgatggctttgcctcagcctctgcttgaccatgcatcactgagcttgagcctcacttccacaaaaatgcagctttgagtgtcgctgctatgtaatcacccccgtttaatgttgtgtgctgggcttctgtaagtacgcagtgtctctggaagaggttggaataacctgcatagaaaagaccttctgagagccgaggagcctctctctggcatgctgggtaccatggtcctggttagagttcagtcccg

SEQ ID NO: 5261 - DNA, 75 bp, Homo sapiens
  misc_feature 1..75: note = U/M: U (0.09:0.88) in Thyroid Epithelium
  misc_feature 1..75: note = source = chr10:108227291-108227365; Gene: SORCS1 (Intergenic)
  source 1..75: mol_type = genomic DNA
cggaagaccaggagattccctcccgtgcctggctcactgggtcccacgaccacggatccttgctcgctgctagcg

SEQ ID NO: 5262 - DNA, 178 bp, Homo sapiens
  misc_feature 1..178: note = U/M: U (0.14:0.93) in Thyroid Epithelium
  misc_feature 1..178: note = source = chr12:123856480-123856657; Gene: SETD8 (Intergenic)
  source 1..178: mol_type = genomic DNA
cgcctcagcctcccggggtgttgggattgcagacggagtctcgctcactcaatgctcactgttgcccaggctggagtgcagtggcgtgatctcggctcgccacaacctccaccttccagccgcctgccttggcctcccaaagtgctaagattacagcctctgcccggccgccaccccg

SEQ ID NO: 5263 - DNA, 365 bp, Homo sapiens
  misc_feature 1..365: note = U/M: U (0.14:0.93) in Thyroid Epithelium
  misc_feature 1..365: note = source = chr2:86257018-86257382; Gene: POLR1A (intron)
  source 1..365: mol_type = genomic DNA
cggcccgagggtcttaatttcaaggaaaaaactctactcaaattaacccgggcgactctgggttggataagttcagcagggtgctttactggggacctgaatgaggctaacgtgccccagaatccccgggaggcagacgaggacacgcacacttggtttggggaatgtggcctggaagcacaaatggctcaggaagggccagagtaaatcgcgtagagcgagcctcccagtggctgggtcttgagacaacgtggggtgaggactaatgctttgtcccaggccagcagacagcctgtcttacctctgcatacttgaatagctctgggaggttgattccttctgtgtttagcacaagctccttctcg

SEQ ID NO: 5264 - DNA, 372 bp, Homo sapiens
  misc_feature 1..372: note = U/M: U (0.16:0.95) in Thyroid Epithelium
  misc_feature 1..372: note = source = chr5:60620150-60620521; Gene: ZSWIM6 (Intergenic)
  source 1..372: mol_type = genomic DNA
cgtaccttagtagctcttaagggcatcattgtgtttataatcagtccttataatatgcttaagaagtcaaagaagtgtgtcatgttttagaaagatttctagtgtgcagggttaagcctgtatttttattttattttgagacagagtctcactcagtcacccagaatggagtgcagtggcgtgatctcagctcaccgcaacctctgcctcccaggttcaagccgtcttgtgcctcagcctctggagtaactgggattacaggtgcttgccaccaagcccagcaaattttgtgtatttttaatagagacagggttttgccatgttggccaggctggtctcaaactccgggcctcaaatgatctgcctgcctcg

SEQ ID NO: 5265 - DNA, 376 bp, Homo sapiens
  misc_feature 1..376: note = U/M: U (0.17:0.94) in Thyroid Epithelium
  misc_feature 1..376: note = source = chr17:38067990-38068365; Gene: GSDMB (intron)
  source 1..376: mol_type = genomic DNA
cgaacatggaagccactggcttgcccacaaggcagagggaaacaagcacaaaatactgatgtgggcagctcagtgcaggagagcagaggagagcaaaggagagtgcctcttaaaccaccaggtttggaggtggaggttgcagtgagccgagatcatgccattgcactctagcctggccgacagagcgagactccgtctcaaaaaaaaacaaaacaaaaaccaaacaaaaaaaaaacaaccaggtttgtccaagtcagaggaattaaccatcctgggggacagcagggatatgagtgaattgggggcatcagaaggcttcctggagactgctcctgggtgaatgagaaggcttctggaggcagagaagaggaaggcg

SEQ ID NO: 5266 - DNA, 498 bp, Homo sapiens
  misc_feature 1..498: note = U/M: U (0.16:0.93) in Thyroid Epithelium
  misc_feature 1..498: note = source = chr8:28762393-28762890; Gene: HMBOX1 (intron)
  source 1..498: mol_type = genomic DNA
cgtgttagccacgatggtctcgatctcctgacctcgtgatccaccctccttggcctaccaaagtgctgggattacaggcatgagctactgcgcccggcctcttcacactcttattttgttagtttagatagtataatcaaattccacagttgcaagaacaccttgtctaaacagtaagggaataaaccagcttactcttggttggcacacagtggagtgtttgaaacagcctaataagcatccttgtcagtttgttttagaaggggaatctagagaatattggttgattatgatggttggttaattggaggctgagcaagagcttccacatgagcagtaggaactgaagggttttttgttgttgttgttgttgaaaagaattgttttcaaagtgagttcactgaaaacttctacttaaataagccaaaagaaaaacaaaacaaaaaaccaggcgcgcgtgcatgcgcacacacacgcacgcacacacacacacacacg

SEQ ID NO: 5267 - DNA, 206 bp, Homo sapiens
  misc_feature 1..206: note = U/M: U (0.14:0.9) in Thyroid Epithelium
  misc_feature 1..206: note = source = chr19:14157259-14157464; Gene: IL27RA (intron)
  source 1..206: mol_type = genomic DNA
cgtagcgtggcagtcagcagcatcgctgggagcacggagctactggtgacctggcaaccggggcctggggaaccactggagcatgtagtggactgggctcgagatggggaccccctggagaaactcaactgggtccggcttccccctgggaacctcagtgctctgttaccaggtgaggccctgggacacctgggtctccatccccg

SEQ ID NO: 5268 - DNA, 240 bp, Homo sapiens
  misc_feature 1..240: note = U/M: U (0.12:0.88) in Thyroid Epithelium
  misc_feature 1..240: note = source = chr5:179103360-179103599; Gene: CBY3 (Intergenic)
  source 1..240: mol_type = genomic DNA
cgcgatcttggctcactgcaacctccacctctccggttcaagtgattttcctgcttcagcctcccaagtagctgggattacaggcgtctgccatcatgcttggctaatttttgtatttttagtagaaatagggtttcaccatgttggcggccaggttggtgtcgaactcctgacctcaggtgacccacctgccttggcctcccaaagtgctgggattacaggtgtgagccactgtgcccg

SEQ ID NO: 5269 - DNA, 325 bp, Homo sapiens
  misc_feature 1..325: note = U/M: U (0.18:0.94) in Thyroid Epithelium
  misc_feature 1..325: note = source = chr3:183408133-183408457; Gene: YEATS2 (Intergenic)
  source 1..325: mol_type = genomic DNA
cgtgtctgtaatcccagctacttgggaggctgaggcaggagaatcacttgaactcaggaggtggaggttgcagtgagccgagattgtgccactgcactccagcctgagcgacagagtgagactccatctcaaataaataaaaaaaaattttttttaatttaaaagggtggccaggcacagtgcctcacgcctgtaatcctagcactttgggatgccgaagcggacggatcacctgaggtcaggagctggagaccggcccggccaacatggtgaagccccgtctctactaaaaatacagaaattagccggaaatcacttgagcccg

SEQ ID NO: 5270 - DNA, 111 bp, Homo sapiens
  misc_feature 1..111: note = U/M: U (0.13:0.88) in Thyroid Epithelium
  misc_feature 1..111: note = source = chr3:183972308-183972418; Gene: ECE2 (intron)
  source 1..111: mol_type = genomic DNA
cggtgaaaccccgtctctactaaaaaaaaaaaaaaaaaaagaaattagccgggcgtggtggcgggcgcctgtagtcccagctactcgggaggctgaggcaggagaatggcg

SEQ ID NO: 5271 - DNA, 424 bp, Homo sapiens
  misc_feature 1..424: note = U/M: U (0.16:0.91) in Thyroid Epithelium
  misc_feature 1..424: note = source = chr10:123691016-123691439; Gene: ATE1 (Intergenic)
  source 1..424: mol_type = genomic DNA
cgagtagctgggattacaggagtgcaccagcataccgggctaattttttatttttagtagagatggggtttcaccatgttggccaggctggtctcaaagtcctgacctcaggtgatcctcctgtctcgccctcccaaagtgctgggattacagttatgagccactgcgcctggcttgtcttttctttttgaggcagtttcactctgttacccgggctagagtgcggtgccacaatcaaagcttactgcagtctcaacctcctgggctcaagtggctgagattacaagtgcacaccaccacgcctggctaatttttgtatttttagtagagacggggtttcaccatgttgcccaagcaggtctcaaactcctgagcttgggagctcagcccactttggcctcccaaagcgctgggattacaggcg

SEQ ID NO: 5272 - DNA, 259 bp, Homo sapiens
  misc_feature 1..259: note = U/M: U (0.22:0.96) in Thyroid Epithelium
  misc_feature 1..259: note = source = chr15:75768694-75768952; Gene: PTPN9 (intron)
  source 1..259: mol_type = genomic DNA
cgcccaggctggagtgcagtggcgtgatctcagctcactgaaacctctgcctgccgcgttcaagcgattctcctacctcagcctcctgagtagctgggattacaggcatgcaccactacgctcggctactttttgtagttttagtagagagggggtttcatcatgttggccaggctggtttcaaatacctgacctcaagtgatctgcccgccttggcctcccaaagtgctgggattacaggcttgagccaccgtgcccg

SEQ ID NO: 5273 - DNA, 309 bp, Homo sapiens
  misc_feature 1..309: note = U/M: U (0.19:0.93) in Thyroid Epithelium
  misc_feature 1..309: note = source = chr16:73058458-73058766; Gene: ZFHX3 (intron)
  source 1..309: mol_type = genomic DNA
cgaggactgggaatgcaatgataaaacgaaatctcaccagcactcagtaaagccagatccaatggcagccttgggctggtcacccctaaaccgccatgtgtcagtcgggttccgcctcccagaagcgggttaccctgatttgtgagctgattattctagaagactccagggtctgaaagtatctcaacaggttggctatgtaaaaacacagtcaatcaagcagccagacactttgcagagagactccactccacgaagaattacaggaggaccagagggtctggctgtgccggatcccacagctcagcg

SEQ ID NO: 5274 - DNA, 449 bp, Homo sapiens
  misc_feature 1..449: note = U/M: U (0.2:0.94) in Thyroid Epithelium
  misc_feature 1..449: note = source = chr7:75953823-75954271; Gene: HSPB1 (Intergenic)
  source 1..449: mol_type = genomic DNA
cggtatggtagcactcccagctacctgggaggctgaggcgggaacacgtgagcccaggagtttgaggctgcagtgagctatgatcgcactgctgcactctagcctgtgagacagagcgagaccctgtcttaagaaaacacatatcacaacagactggacgcctaagcagagagtacgtgtgacttagctcccaagagatctgcaaaacagtaaaacaaagctactcttgcacctgtaacgggacattacgccaaaggaacaagggtgaaatagcggcaactttcaggggatctaccttccttcttcagtgaccctgttagagcaagcttgactgttctgatcttgttcatatctgtgccaaaagtgttttttttttttttttgccctcagtaactgcaatactaaaagtgcttggtcagttaagtgcggtggcttggcctgtaatcccg

SEQ ID NO: 5275 - DNA, 255 bp, Homo sapiens
  misc_feature 1..255: note = U/M: U (0.21:0.94) in Thyroid Epithelium
  misc_feature 1..255: note = source = chr1:45581529-45581783; Gene: ZSWIM5 (intron)
  source 1..255: mol_type = genomic DNA
cgggcagaggctgcaatcttggcactttgggaggccaaggcaggcggctgggaggtggaggttgtagcgagccgagatcacgccactgcactccagcaaaaaccagtcaggcgtggtggcgcgcgcccgcaatcccaggcactcgcaggctgaggcaggagaatcaggcagggaggttgcagtgagccgagatggcggcagtacagtccagcctcggctgggcatcagagggagaccatggagagagggacagcg

SEQ ID NO: 5276 - DNA, 205 bp, Homo sapiens
  misc_feature 1..205: note = U/M: U (0.14:0.86) in Thyroid Epithelium
  misc_feature 1..205: note = source = chr16:19067687-19067891; Gene: TMC7 (intron)
  source 1..205: mol_type = genomic DNA
cgtgagccaccgcgcccagccagggtaagcattttcgactcaaacattccagaaggcccaggaggttaggtggctccctgtaggccattgttaacaaaacattctgggtgtacaggggcgggacactcaacctgtgctgcacgctccttctgagcccgttggtctgtgtcctggcagcatcccttcctcgaaagcctgtgggccg

SEQ ID NO: 5277 - DNA, 317 bp, Homo sapiens
  misc_feature 1..317: note = U/M: U (0.19:0.91) in Thyroid Epithelium
  misc_feature 1..317: note = source = chr6:126254856-126255172; Gene: HINT3 (Intergenic)
  source 1..317: mol_type = genomic DNA
cgtctcaaaaacaacaacaacaacaaacaacaacagcaacaacaacaacaaaaagaaaggtaatgaaagcctctcctagtgcccaggccttgtctgacataaagttttcctgacacggccttcatcacgtgtttttgttcctgtgctgggcattcctccacttatggcagcactgtagcataccatatcccttaccaggcaccctctacagtgcacgatggtccactgaaaataaaaacaacccattccttacatagaattgtgcattcagtcccaaaccaacagaaataatggaatgtctcagaatgcctcacacg

SEQ ID NO: 5278 - DNA, 490 bp, Homo sapiens
  misc_feature 1..490: note = U/M: U (0.22:0.93) in Thyroid Epithelium
  misc_feature 1..490: note = source = chr8:144617767-144618256; Gene: ZC3H3 (exon)
  source 1..490: mol_type = genomic DNA
cgcctggaggccgctcccccagtgtgtcctggcaaacatcaccgcagtgggggtcaacctcaaaggggctacgccccacaatctgcaggccggggccttcccaggccaccacaggggctctcaggggctcagaccagttctctccaggcgtgactgggcacacttagagtggtacagcaggagaccagaccaattctttcaggccactcaaaaaactcacacagtaccatgtgacactcagaaagggcagggcaggtagacctgcagccccagccagctgagcacagaagggccctggaggaggcagaggcctgggggtgcccagcgcagcacaagcgagggcttcacccctgcttaagggctcagcagccgccgccctctcctccctcaggagggacacagctgggtccataccaagggacacacagaagaggccacagcacctgcccagcagcacatcccacagccagactgcagggcgcagcatccg

SEQ ID NO: 5279 - DNA, 221 bp, Homo sapiens
  misc_feature 1..221: note = U/M: U (0.26:0.96) in Thyroid Epithelium
  misc_feature 1..221: note = source = chr1:193160548-193160768; Gene: CDC73 (intron)
  source 1..221: mol_type = genomic DNA
cgctctgttgcccaggctggagtgcagtggcgtgatcttggctcactgcaacttccacctcccagtttcaagtgattctccttcgtcagccacccgagtagctgggattacaggcgtgtgccaccacacttggctaatttttgtatttttagtagagtcgcggtttcgtcatgttgcaggctggtctcaaactcctaacctcaagtgatctgcccacctcg

SEQ ID NO: 5280 - DNA, 237 bp, Homo sapiens
  misc_feature 1..237: note = U/M: U (0.24:0.94) in Thyroid Epithelium
  misc_feature 1..237: note = source = chr15:89011962-89012198; Gene: MRPS11 (intron)
  source 1..237: mol_type = genomic DNA
cgggtgcagtagctcatgcctttaatcccagcactttaggcggccaaggtgggcgaattacttgaggtcaggagatcgagaccagcctggccaacatggcgaaaccccgtctccactaaaagcacaaaaactagccaggcgtgatgtctggcacctgtaatcccagccactcaggaggctgaagtagaagaatcgcatgaacccagggagcggaggttgcagtgagccaagatcacg

SEQ ID NO: 5281 - DNA, 348 bp, Homo sapiens
  misc_feature 1..348: note = U/M: U (0.24:0.93) in Thyroid Epithelium
  misc_feature 1..348: note = source = chr17:1318285-1318632; Gene: YWHAE (Intergenic)
  source 1..348: mol_type = genomic DNA
cgggatcatcaatttgtttttatttttgagatggggtctcaccctgttgcccaggttggagtgcagtggtgcgatcgcggctcactgcaacctccacctcccgggttcaagcgattctcctgcctcagcctctcgagtatctgggactacgggcacctgccaccatgcctggctaatttttaaaaattattttagtttattttatttagacgagtgagtctcgctctgttggtcaggctggagtgcagtggcacaatctcggatcactgcaacctccgcctcccggattcaggcagttctctgcctcagcctcacgattggctgagattataggcacctgccaccacg

SEQ ID NO: 5282 - DNA, 32 bp, Homo sapiens
  misc_feature 1..32: note = U/M: U (0.27:0.94) in Thyroid Epithelium
  misc_feature 1..32: note = source = chr16:30026699-30026730; Gene: DOC2A (Intergenic)
  source 1..32: mol_type = genomic DNA
cgatcgcggctcaccgcaacctccgcctctcg

SEQ ID NO: 5283 - DNA, 308 bp, Homo sapiens
  misc_feature 1..308: note = U/M: U (0.32:0.94) in Thyroid Epithelium
  misc_feature 1..308: note = source = chr19:5106165-5106472; Gene: KDM4B (intron)
  source 1..308: mol_type = genomic DNA
cgtcctgtagaccgcatcttgccagcgcacacctccctgttgtgtgtcgtttatttagtctgtccacgatggttgaacggtttggttagagtcattgtgtgtgtgtgtgtgtgcgcgcgcgtgcaagcgtacttgtctttcagtacaaaagcaaaggacatctttgaattccttccttccttaggcgagatcgctagcagggggagattagggatgagcttgcctggagtgtgcaaagatccacgttgcacccgtcatctgcagcttggaagagctgctcagctcctccttgcatcctcctgaggccg

SEQ ID NO: 5284 - DNA, 382 bp, Homo sapiens
  misc_feature 1..382: note = U/M: U (0.33:0.95) in Thyroid Epithelium
  misc_feature 1..382: note = source = chr15:41363111-41363492; Gene: INO80 (intron)
  source 1..382: mol_type = genomic DNA
cgtcccggcactttgggaggccgaggcaggcatatcgcatgagcccaggagtttgagaccagtctgggcaacatggagacagcccgtttctacaaaaaatacaaaaattagtcaggcgtggtggcatgtgtctgcagtcccagctattctgggggctgaggcaggagggtcacttgagcccaggagtttaaggctacagtgagccataaacgcaccactccacttcagcctgggtgacagagtaagatcctgtctcaaaaagaaagagaaacagagacatccttctgcctcttgtcaaaggatatagctttttattttttaataaatctacattaatttatttttaattatactttaagttctagggtacatgtgcacaacg

SEQ ID NO: 5285 - DNA, 448 bp, Homo sapiens
  misc_feature 1..448: note = U/M: U (0.19:0.93) in Thyroid Epithelium
  misc_feature 1..448: note = source = chr14:103375499-103375946; Gene: TRAF3 (exon)
  source 1..448: mol_type = genomic DNA
cgacatacgctgggcctttcagctcgccgtgctctggtgacacacaggcggccaggttgggatttgtgtcaattctaggagccatcaagcatgaatgtggttctgtctcctgagcgcaagcctcgccggacccctgggcgaaggcctggacttgcagatgtgtgttccctgtgcgggtggacagagggggcccttatgacccacattgcagccccattccaccaccccttcctccccagagcagtctctgccgagggacagcacctgtgtcccttcgatgccacaacagccagttgaacaggggagccctttgctcaggcagcttctcctgcctctccctcctttctccttccctgccccatccccgtgcccttcttggcctgtggcgctggggagccatggtgtggcatactggggctcctgctccttgggccacttcctcagcccg

SEQ ID NO: 5286 - DNA, 317 bp, Homo sapiens
  misc_feature 1..317: note = U/M: U (0.02:0.93) in Thyroid Epithelium
  misc_feature 1..317: note = source = chr10:134559550-134559866; Gene: INPP5A (intron)
  source 1..317: mol_type = genomic DNA
cggcgttgcctgcacgtgtgcccagatggcttcttcggagccctgagtgggcccccgaggctgtgtgtccacttggcccaggcagggcgctctggacacctggtgattccaggtagagagtggagcccaggcgcctgctggctgtgcgtgcggtgcctggaggctacagccagcgaggattcatttcagagagtacagaacaactttttgtttttataaaccagctcttgaaggttgcatttaaaaacttgggctgacagggtctgagaggatgtgtttgcctttagtagagttttggattttgtggcagagtgtcc

SEQ ID NO: 5287 - DNA, 256 bp, Homo sapiens
  misc_feature 1..256: note = U/M: U (0.04:0.93) in Thyroid Epithelium
  misc_feature 1..256: note = source = chr2:3456139-3456394; Gene: TRAPPC12 (intron)
  source 1..256: mol_type = genomic DNA
cgagtcactaagtccaggccacacgcaagggatgggaatgagactctgccttttgaggagtgctcaggaatgcatggccgcatttaaactgccacactgtggccggtcagctgggtctgttccacttcaggatccacaggcctctcctggccctgcaggacaggctcccctgcctccactccagcccgtcctggtggttgtgagccgcacttaaccctgccaggatgcggcttgtactgggaggcccatgggctcc

SEQ ID NO: 5288 - DNA, 285 bp, Homo sapiens
  misc_feature 1..285: note = U/M: U (0.04:0.93) in Thyroid Epithelium
  misc_feature 1..285: note = source = chr19:4676153-4676437; Gene: DPP9 (exon)
  source 1..285: mol_type = genomic DNA
cgggggggacaggcaattgcatgcttgggtgctggggacggtggctggccgggccaggggactgagaggtcacagggagccccaggcggaaggcagcccgctcctctgagtctcttctggcctctccagtgcccatcagcgtgtgacctcctcctcccagaaggcggggagaggaggggctggcccgagaccaccatctctctgtctcggcaaccaagaagcagcggacataaaacccaagagcgtttaaaaaaggataaaaggcgtcggggcggtgaaggcagc

SEQ ID NO: 5289 - DNA, 429 bp, Homo sapiens
  misc_feature 1..429: note = U/M: U (0.04:0.92) in Thyroid Epithelium
  misc_feature 1..429: note = source = chr9:126368280-126368708; Gene: DENND1A (intron)
  source 1..429: mol_type = genomic DNA
cgagaggagatgggccttcctgagcaccttccgtaaacggctttcctttggccccaggtctgagctacaggttcctgcaagaaaccgcagaaggagtatccctttcacctgaagggtacaatcgaactagataagccccatcagaaagcacaactagagcactcggaatctgagctgaaattccagggaggaggtcaggagactgaattctaagattcagtagttcacggctgccctacacactcaggaaacacttctttgttcataaagtgtcttggctggtttcaagagtgggacaactcccatttttgtttttatttttgtgctgactacacaggagttcagcacagcaaactcctccccagcctccgtcaatcagcagggctaagatctatctgggccagtgcttcctaagccttctcccttaac

SEQ ID NO: 5290 - DNA, 61 bp, Homo sapiens
  misc_feature 1..61: note = U/M: U (0.08:0.94) in Thyroid Epithelium
  misc_feature 1..61: note = source = chr22:31522407-31522467; Gene: INPP5J (exon)
  source 1..61: mol_type = genomic DNA
cgatgtcacatccctcctccacctgggcggtggtgacgacagcgacggcgcagacatgatc

SEQ ID NO: 5291 - DNA, 174 bp, Homo sapiens
  misc_feature 1..174: note = U/M: U (0.03:0.89) in Thyroid Epithelium
  misc_feature 1..174: note = source = chr9:128200029-128200202; Gene: MAPKAP1 (exon)
  source 1..174: mol_type = genomic DNA
cggtccccggccctggctggggacagtaaggacatcaccgcaggagggacactgaagaggctgtcgaggactgcagaggcatctggtgtggccagaggcgtggtgtcaggggcatctgatcccttgcctgttcccacccagggagccggacggcacggacacaggtctccctcc

SEQ ID NO: 5292 - DNA, 467 bp, Homo sapiens
  misc_feature 1..467: note = U/M: U (0.02:0.88) in Thyroid Epithelium
  misc_feature 1..467: note = source = chr19:46307986-46308452; Gene: RSPH6A (exon,intron)
  source 1..467: mol_type = genomic DNA
cgccctcctcctcgccgtgcgcctccatgacctcgccaccttccgtcatctcctccacctcctcctcctctgcctcctcctcgccctcccggaattccacctcggccaccaggtagctgcgtttgattcccaggatcttgccccagaagcgacaggtgtggatgggctgctgctccaccagctgtttcatggccaggaaaatgcggaagctctcgtccgagctcaggccgacgccggcctgctcgaagtagaaggcagtctccatgatgttgggcactggtgtctccccctgcgcagggtagggtggagggcagaggggagaatgctgaagctctgctccctagcctacctcttccagactcttctagagtcaagagagctaaaagaggccgggtgcagtggctcacgcctgtaatcccagcactttgaaaggccgaggctggctgatcacttgaggtcaataattc

SEQ ID NO: 5293 - DNA, 59 bp, Homo sapiens
  misc_feature 1..59: note = U/M: U (0.08:0.93) in Thyroid Epithelium
  misc_feature 1..59: note = source = chr6:13988034-13988092; Gene: RNF182 (Intergenic)
  source 1..59: mol_type = genomic DNA
cgacgccgtcctctcactcactcgctctcatcacccatgcatgctctcgagtggcttgc

SEQ ID NO: 5294 - DNA, 259 bp, Homo sapiens
  misc_feature 1..259: note = U/M: U (0.08:0.92) in Thyroid Epithelium
  misc_feature 1..259: note = source = chr8:96038416-96038674; Gene: NDUFAF6 (intron)
  source 1..259: mol_type = genomic DNA
cggccgcggtggctacacgcctgtaatctccgcactttaggaggctgagaccggtgggttgtttgagcccaggtgtctgagaccagtctggccaacatggcgaaaccccatccctacaaaaaaataaaaaattagttgggcgttgtgtcccgcgcttgtggtcccggctgctccagaggctgacgtgggaggatcgcttcagcctgggaggtggaggttgcagtgaaccaagatcgctccactgcactctagcctgggc

SEQ ID NO: 5295 - DNA, 401 bp, Homo sapiens
  misc_feature 1..401: note = U/M: U (0.1:0.93) in Thyroid Epithelium
  misc_feature 1..401: note = source = chr1:1491550-1491950; Gene: SSU72 (intron)
  source 1..401: mol_type = genomic DNA
cgcctataatcccagcactttgggaggccaaggcgggtggatcacaaggtcaggagatggagaccatcctggctaacacggtgaaactccatctctattaaaaatacaaagaattagccaggcgtggtggcggcgtgcctgtagtcccagctacttgggaagctgaggcaggagaatcacttgaacaaggtgaaacccatgtctactaaaaatacaaaaaattagccggacgtggtggggggcgcccgtaatcccagctacttgcgggggctgaggcaggagaatcgcttgaacccaggaagtggagcttgcagtgagccaagaccacgccattgcactccagcctgggcaaaaagagcaaaactcttgtctcaaaaaaaaaaaaatttcattttgatagc

SEQ ID NO: 5296 - DNA, 348 bp, Homo sapiens
  misc_feature 1..348: note = U/M: U (0.11:0.93) in Thyroid Epithelium
  misc_feature 1..348: note = source = chr14:21559955-21560302; Gene: ZNF219 (exon)
  source 1..348: mol_type = genomic DNA
cgagggagtggcggcgtaagagtcagaggaggacgcggcgtacccggagagcggagggtacctacataccctgcgtggcggtcgatcttgcctgggccccagcagcagaggcagagtgccccggtccctcacccgggcgcgggtgcagggaagccagagagcccagcgacctgccccgggcccaggtttcctcctcggcctccaccacctcctcttcttcctcaggctcctccgcacggtgccggcgagcccgggccgggagagcagaggacagcgggcggaagcctccgaagctgcggccgggaccgggctcagcaccctcgccgttgggccggccctcgccagctc

SEQ ID NO: 5297 - DNA, 201 bp, Homo sapiens
  misc_feature 1..201: note = U/M: U (0.05:0.95) in Thyroid Epithelium
  misc_feature 1..201: note = source = chr2:3449848-3450048; Gene: TRAPPC12 (intron)
  source 1..201: mol_type = genomic DNA
cgtggggccaccgtcagtgagagagccactcatgcttctcgttccctccgctggtctacagttccacctgcctctcatcttgtgaatacataaccgcacttcaggtatctctcatgtttaaagatacatatcttttccatggcatgatccaaatctaagccaacactccttatggtacttaaatgaggaaatcgcaattcg

SEQ ID NO: 5298 - DNA, 321 bp, Homo sapiens
  misc_feature 1..321: note = U/M: U (0.02:0.92) in Thyroid Epithelium
  misc_feature 1..321: note = source = chr1:1492055-1492375; Gene: SSU72 (intron)
  source 1..321: mol_type = genomic DNA
cgtggcctcaacacagagccacacaaggctcaggccagctctgggggggtccaccatggccttgcgactgcaggcaccgtgaaactactttgcaaaagcatctcacctgctgcagactaggtgaaaactcacaggcttgtgggccctgaccctgggctacctcttgaagacgaaggcacagtcagcacagctgcattctgtccagaccctcaaatgaccaccagcaactacctcagccagtcagctccgttctacctctgtcatctcagatgagaagagcaggccagtatctctggccttacctgaaatatcttaaggccg

SEQ ID NO: 5299 - DNA, 138 bp, Homo sapiens
  misc_feature 1..138: note = U/M: U (0.04:0.93) in Thyroid Epithelium
  misc_feature 1..138: note = source = chr11:63562698-63562835; Gene: C11orf84 (Intergenic)
  source 1..138: mol_type = genomic DNA
cgcctcccaggttcaagtgattctcatgcctcgctccacaagtagctgggattacagtcgcacgccaccacgcctgactaatttttgtatttttacaccatgttggccaggctggtaaatttggtgatttcttaagcg

SEQ ID NO: 5300 - DNA, 283 bp, Homo sapiens
  misc_feature 1..283: note = U/M: U (0.03:0.92) in Thyroid Epithelium
  misc_feature 1..283: note = source = chr13:115052291-115052573; Gene: UPF3A (intron)
  source 1..283: mol_type = genomic DNA
cgttggttgatggagagcacgtgatttttttagttaagatcattttaagttatgatgcttccgaatgagcagtgcagaagacacatgaatggtctgttcctgagcgtcagggaaggcatgttgtgtcacatagttgaagtcagtggtcacagacggatgcctcaagagcccataggaatgagatgttttgcttgcggtgaggtcatcttgctgcttcaacacaaatgccaggctccccgagccaggccaacttgtggataagcccagccagagcacagaatcg

SEQ ID NO: 5301 - DNA, 419 bp, Homo sapiens
  misc_feature 1..419: note = U/M: U (0.03:0.92) in Thyroid Epithelium
  misc_feature 1..419: note = source = chr16:27509934-27510352; Gene: GTF3C1 (intron)
  source 1..419: mol_type = genomic DNA
cgggcacctccacttgcctgttggctgtgcttgaattggagatccggaagcggacctgctcgatggcacttctcactagagggtcgttctggtccatggacgggtgcaccaccagatccacctggagagagaggttggagcatcccacagggtgagggaagagctgaggaagacttggctccacagtcgattcctagtggaacctcagtcatacctgttttcattaacatttccaaaacacgattaggagatcgaaacaaaatttgttgctcaacagtttgctggtacagctactggcggcaaaattcctcaagtgaccaagcgatcaggctctgccatgggtgccggggctgctcggtcccactgagaaatctggcctggacacagagctgtctccctgcaagtcccttactgggccg

SEQ ID NO: 5302 - DNA, 420 bp, Homo sapiens
  misc_feature 1..420: note = U/M: U (0.02:0.91) in Thyroid Epithelium
  misc_feature 1..420: note = source = chr17:7076025-7076444; Gene: ASGR1 (TTS)
  source 1..420: mol_type = genomic DNA
cgctttgttgcttctgttccgcagtactggttttcctagtatgtttggtgattcttggttgtgtgttcgttgtatctgctacctgtctatgaacactgcttctgtttgctgtaatgaatgcaaaggacaccagtgagtttcattcgaagttgttgaagcactcaacaaattcgggtggttctgccgggggcagtggctcacgcctgtaatcccagcactttgggaagccgaggggggcagatcacttgaggtcaggaattcgaggccagcctggccaacaatggtgaaacccggtctctactaaaaatacaaaaattagccgggcgtgatggtgcactcctgtgatctcaggtactcgggaggctgaggcaggagaatcacttgaacccggggggcagaggttgcagtgagctgagatcg

SEQ ID NO: 5303 - DNA, 446 bp, Homo sapiens
  misc_feature 1..446: note = U/M: U (0.04:0.93) in Thyroid Epithelium
  misc_feature 1..446: note = source = chr6:159044831-159045276; Gene: TMEM181 (intron)
  source 1..446: mol_type = genomic DNA
cgcccaggctggagtgcagtggtgcaatctcagcttactgcagcctccgcctcctgggttcaagtggttctcctgcgtcagccttctgagtaactgggacgataggcgtgcgccaccacacctgggtaatttctgtatttttagtagagatgggggtttcaccatattggccagactgttctcaaactcctgatctcaagtgatctacccatctcggcctcccaaagtgctgggattacaggcgtgagccactgtacccggcagaaaagctctttaaaacaatgtttttactcccagtctttggtttgtggctgacgcagtttgaggccctgtcactgtggttctggtcggctgctcttccttcccagtcaggtgtcggggagaaccagccatgtgggctctggaacagaccccagggcccacgtctgttgctgaaggagacaccg

SEQ ID NO: 5304 - DNA, 487 bp, Homo sapiens
  misc_feature 1..487: note = U/M: U (0.04:0.93) in Thyroid Epithelium
  misc_feature 1..487: note = source = chr2:236897052-236897538; Gene: AGAP1 (intron)
  source 1..487: mol_type = genomic DNA
cgcacctgcttcagatactactcagaatttcttgtccttaaatgccacccccaacccccgccccgaagtcaggaagtgatttctgaactttagcgtaagtgttctctggcaggtatggctgtttttctgagcagtaggtacttagtcaaggcatgcaggcgtttctccttgttttagttcatctgcagaggtcagctttttccattgtctctgaaacacttgcatttttcctgtaactttccagtaatgagggggcccagtgggtaaatggaatcttaaagacgagaaatgattatttttttcccgccgactccactctggccaagacgagctctcagattgcacttcagaatcggtgatgcgcactcattcccctgcacccacccttttttctgtggtcagcatgtgtttcccagactgggcgtcactgtcgcctccttgactctcatcactcacatggtcccccagcaggtaacttgcttcagcg

SEQ ID NO: 5305 - DNA, 214 bp, Homo sapiens
  misc_feature 1..214: note = U/M: U (0.04:0.92) in Thyroid Epithelium
  misc_feature 1..214: note = source = chr20:23969053-23969266; Gene: GGTLC1,GGTLC1 (intron,exon)
  source 1..214: mol_type = genomic DNA
cgatctcagctcactgcaatctccacctcagcaggagagcaggaatcttcagtgatccacgggcagatctgccgccattgtgggcacctgttcctcccgcgacctttgtgcccgtgtctctccttccagtacctattgcatgaccccccacgtccgcctcccgccattgccagcaagtgccttgcgcgggtacctggctgcgcttattaatccg

SEQ ID NO: 5306 - DNA, 420 bp, Homo sapiens
  misc_feature 1..420: note = U/M: U (0.07:0.95) in Thyroid Epithelium
  misc_feature 1..420: note = source = chr2:3266591-3267010; Gene: TSSC1 (intron)
  source 1..420: mol_type = genomic DNA
cgtgtcactcatgagaagagctcagtcatacccaccacggcacagggtcgggcagggccagcagtgattgactacaaagtagagacggtgcacacaggacagagtcaggcaggaccagagggcaccagaaaactgcatggtaggtgcccaaaccatacaagacttctctgccccggaccctccctgcactcatgcctgtggccatgtgggagtcctgtacttttagctgaagaaggagaagagatctgagctgctttacagatcaatgagttcgggagagggcataagccaaacattggcaggcgctgtcagacggctacgctcaggagacggctgggagagcatggagggaaagctgattgtgaagaacggtgatcatgaggcagggctcccagcactgctctggccatccctgtggcg

SEQ ID NO: 5307 - DNA, 188 bp, Homo sapiens
  misc_feature 1..188: note = U/M: U (0.05:0.91) in Thyroid Epithelium
  misc_feature 1..188: note = source = chr20:9393796-9393983; Gene: PLCB4 (intron)
  source 1..188: mol_type = genomic DNA
cgtcgggcatggctgtgctcacttctgaaaacttgcagtggcccggtgatgcttgaagcactttccttgcccacctcagcgatcacacctaagatgccatcagctgtctaacatgccatgaggaatcctggcagcctggccggatgcagggagtattgtttctgtataaaaaaaatcctgacggctcg

SEQ ID NO: 5308 - DNA, 321 bp, Homo sapiens
  misc_feature 1..321: note = U/M: U (0.05:0.91) in Thyroid Epithelium
  misc_feature 1..321: note = source = chr16:16018823-16019143; Gene: ABCC1 (Intergenic)
  source 1..321: mol_type = genomic DNA
cggtggctcatgcctgtaatcccagcatttggggaggtcgaggtgggcggatcgcttgagcccaggagttcgagcccagcttgggcaatatggcaagacaccgccccccgactctacaaaaaatacaaaaattagccaggcgtggtggtgagtgcctgtagtaccagctacttgaaaggctgagttgggagaatcagctgagcccaggaagttgaagctgcagtgagccgtgatcgcaccactgcactccagcctgtgcaacgtggcaaaaccagagtggggccttgtctcattttaaaaagtaataagagaccgagcacg

SEQ ID NO: 5309 - DNA, 166 bp, Homo sapiens
  misc_feature 1..166: note = U/M: U (0.02:0.87) in Thyroid Epithelium
  misc_feature 1..166: note = source = chr19:30129869-30130034; Gene: PLEKHF1 (Intergenic)
  source 1..166: mol_type = genomic DNA
cgagtgtcagctctgccacttgggaaagtccttaaaactcttctcatctgcgaagagatcaaccatgagattggtcatagaactaacttcaccgggatgttgtaaggcttgagtgcactgtctatggaagcacttagcacactgcctagcacatcgcaaatgcccg

SEQ ID NO: 5310 - DNA, 174 bp, Homo sapiens
  misc_feature 1..174: note = U/M: U (0.06:0.91) in Thyroid Epithelium
  misc_feature 1..174: note = source = chr13:22786818-22786991; Gene: LINC00424 (Intergenic)
  source 1..174: mol_type = genomic DNA
cgcagagcacagcgaccgggagccccaggcagtggtgtgccaggcaagccaagtggaggggaggacagaggcaggtgtcagggagtgggtagcgttggggacatggccgctgtctaaagaggcacagtggacttggagagaattctggagcagtgaagagccacagagcaggcg

SEQ ID NO: 5311 - DNA, 227 bp, Homo sapiens
  misc_feature 1..227: note = U/M: U (0.07:0.92) in Thyroid Epithelium
  misc_feature 1..227: note = source = chr14:21969885-21970111; Gene: METTL3 (intron)
  source 1..227: mol_type = genomic DNA
cgacagggtcgatcagcatcactggctttcatgcactcctccttggttccatagtcacagaattcttgcacttgggcccgacctcgagagcgaaatttttcaacaatggattgttccttggctgttgtagtatttaatagctctaggatctcctgactgacctgtgacagaagtagccttggacttaaaatgtcttatagatcaaactggctcttagaccaactccg

SEQ ID NO: 5312 - DNA, 112 bp, Homo sapiens
  misc_feature 1..112: note = U/M: U (0.02:0.86) in Thyroid Epithelium
  misc_feature 1..112: note = source = chr2:130919013-130919124; Gene: SMPD4 (intron)
  source 1..112: mol_type = genomic DNA
cggtcagtgacaatccaaacaattgcagtcccagcagccgcgggccagcgcagcacccccctccacaaccaggccagggctgtggccacactctcctcgctttgaaggcccg

SEQ ID NO: 5313 - DNA, 281 bp, Homo sapiens
  misc_feature 1..281: note = U/M: U (0.09:0.93) in Thyroid Epithelium
  misc_feature 1..281: note = source = chr19:12701924-12702204; Gene: ZNF490 (intron)
  source 1..281: mol_type = genomic DNA
cgggcacggtggctcatgcctgtaatcccaactctttgggaggccgaggtgggcggatgacttgaggtcaggaatttgagaccagtctagccgacatggtgaaaccctgtctctactaaaaatacaaaaattagccaggtgtggtggtgcatgcctgtagtcccagctacttggcaggctgaggtagaataaatcgcttgaacctgagaagctgatgttgcagtgagccgagattacgccactgcactccagcctgactgacagagactccatccccgccg

SEQ ID NO: 5314 - DNA, 457 bp, Homo sapiens
  misc_feature 1..457: note = U/M: U (0.07:0.91) in Thyroid Epithelium
  misc_feature 1..457: note = source = chr2:208331846-208332302; Gene: CREB1 (Intergenic)
  source 1..457: mol_type = genomic DNA
cgatggataatgcctagcacagaagtcagcgatgcaaaacatggcgtggatatactttgtaaacaggttggaaattatagttccaaaaaaattattcgttcccttcaaattattccttttggaattagccaggcgtggtggtaggcacttgtaatcccaactactcatgaggctgaggcagaagaatcacttgagcccaggaggttgaggttgcagtgagccaagatcgcatcactgcactccagcctgggcaatagagcaagtctctgtctaaaaaaaaataataataataaataaatacacacacacacacacacacacacacacacacacacacacattccttacattccttttgggaagctcttcatgtattattgataataacaactaccatgtgtcaggcactgaacccaatgctttgccattagttattttatgttattgaatcctcacg

SEQ ID NO: 5315 - DNA, 149 bp, Homo sapiens
  misc_feature 1..149: note = U/M: U (0.03:0.86) in Thyroid Epithelium
  misc_feature 1..149: note = source = chr19:4676417-4676565; Gene: DPP9 (exon)
  source 1..149: mol_type = genomic DNA
cgtcggggcggtgaaggcagcggctcctcggggctggccagcgctgggcgggacaaagtgcctcactggggcccgcgggccactcagtccctcccgcctggttccccgcggaggctgcagccacttgtgctgtgatgtggcggctcccg

SEQ ID NO: 5316 - DNA, 208 bp, Homo sapiens
  misc_feature 1..208: note = U/M: U (0.09:0.92) in Thyroid Epithelium
  misc_feature 1..208: note = source = chr2:74848024-74848231; Gene: M1AP (intron)
  source 1..208: mol_type = genomic DNA
cgcggcaacatgctgtccaaacagcttctccttcaaatccagcttgagggctctaggagtcagctccagaatagagaaacacaccttaaaaatgcgccagaaaggccgggcgcggtggctcacgcctgcaatcactttgggaggccgaggcaggcggatcacgaggtcaggagatagagaccatcctggctaacatggtgaaaccccg

SEQ ID NO: 5317 - DNA, 385 bp, Homo sapiens
  misc_feature 1..385: note = U/M: U (0.04:0.87) in Thyroid Epithelium
  misc_feature 1..385: note = source = chr1:154931253-154931637; Gene: PYGO2 (exon)
  source 1..385: mol_type = genomic DNA
cgtcacccatcgttagcagccaccagctgccccatgccctcacggatgtagacagactggatctccttggtcttgaggcagagatcgcaggcccagacggcagaagcttcagtggtcagcagcccataggcgctctcagtcatgcctgtgcactcacggtggaaccatttctggcaggaggcctcacacagaatggcatcctggtcatcgttcacctcactccgacaggcaccacatgggtacaccaagcctgggggaggctggggcccggagcccccacctgccttgccagggggtgccaagctgttggcatctggagtgcccccaccccgcccactgctgttcggggggaaactgggctggttcccattaacagcagcagccg

SEQ ID NO: 5318 - DNA, 208 bp, Homo sapiens
  misc_feature 1..208: note = U/M: U (0.04:0.86) in Thyroid Epithelium
  misc_feature 1..208: note = source = chr20:62242039-62242246; Gene: GMEB2 (intron)
  source 1..208: mol_type = genomic DNA
cgcatgcagactctccactgctccataagccactgtcccgcgagggcagagccttggcgtcctggcaaagcaactgcagactgaaaaatgccctctggtccttcatggctccctccatcaagacagggggctatttcccaccccctccacttgactttgggccaagctttgaagagctttgaccaagaggctgtgacgaggccctacg

SEQ ID NO: 5319 - DNA, 247 bp, Homo sapiens
  misc_feature 1..247: note = U/M: U (0.08:0.9) in Thyroid Epithelium
  misc_feature 1..247: note = source = chr2:240298350-240298596; Gene: HDAC4 (intron)
  source 1..247: mol_type = genomic DNA
cgggacgcctagttttttgttagttcagaccgtgtgttcctgaatacagcctgagtggccacacttgagtaacgattaaaaagccacagtgctcaacagaacacgccactgctatgacacaaatcctcataatgcaggcatacggctgggaggcagggtctcggtggaaccagactccctgagtaagcacagcacaaaatgtttctgacacactgatgacaactacagcacaaactggggttgcacg

SEQ ID NO: 5320 - DNA, 326 bp, Homo sapiens
  misc_feature 1..326: note = U/M: U (0.11:0.93) in Thyroid Epithelium
  misc_feature 1..326: note = source = chr14:68194229-68194554; Gene: RDH12 (intron)
  source 1..326: mol_type = genomic DNA
cgctcttgtcgcccaggctggagtgcagtagtgcgatcttggctcactgcgacctctgcctcctgggttcaagtgattctcctgcatcagcctcttgagtagttgggattacaagcacgcaatatcacgcctggctaattttgtatttttagaagagacgagctttcaccatgttgtccaggttggtctcaaactcctgacctcaggtgatctggcagaagaggcctttggtaacaggtattattactcctagtttatagagcagagctgaggtccaaggaaatggccagctaaagagtatatggcaggtgagggcatcagaaccg

SEQ ID NO: 5321 - DNA, 495 bp, Homo sapiens
  misc_feature 1..495: note = U/M: U (0.1:0.92) in Thyroid Epithelium
  misc_feature 1..495: note = source = chr1:57046407-57046901; Gene: PPAP2B (Intergenic)
  source 1..495: mol_type = genomic DNA
cgctctgcctataatgcataccctttcctcctctagttagggaaatgcttctcttgctttagtatcctctgaaatgtcacctcctctctgagtactttcttcattcctgcacagaattaacttcactgtcaactctttgcttctaactatttttttttcccccgagatggcgtctcactctatcgcccaggctggagtgcagtgcctcaatcttggctcactgcaatctccgcctcccggattcaaaggattctcttgcctcagcctcctgagtagctgagattacaggctcgtgccaccacacacggctatttttgtatttttagtagagatggggcttcaccatgttggtcaggctggtctcaaattcctgacgtcatgatcgcctgcctcggcctcccaaagtgctaggattacaggcatgagcctatgtcagcctgatttggtgttacagatggtaaagactagcaaactgtgtaggttatcagcgccgcg

SEQ ID NO: 5322 - DNA, 291 bp, Homo sapiens
  misc_feature 1..291: note = U/M: U (0.1:0.91) in Thyroid Epithelium
  misc_feature 1..291: note = source = chr13:113488301-113488591; Gene: ATP11A (intron)
  source 1..291: mol_type = genomic DNA
cgggtcctctgctggcctctcgcatcccaaagccatgctctgtctctgccgtcccagtggctcccacaaggccctgaaggtcgctgacccccaggcgtgcaggaggaggcattgtatagatgggtgcacccacgtgctggctgaaggcctgcgctggaccttcgttccccgtcagtgactcaagggccttggtgtgggggtaacagcctctcagggtccctctccctctggcatcgtgttctccgctcaacaacaacaaagtccacgaatcaatgagcaaaagtgtcatcg

SEQ ID NO: 5323 - DNA, 339 bp, Homo sapiens
  misc_feature 1..339: note = U/M: U (0.11:0.92) in Thyroid Epithelium
  misc_feature 1..339: note = source = chr2:206605235-206605573; Gene: NRP2,NRP2,NRP2 (exon,intron,intron)
  source 1..339: mol_type = genomic DNA
cgctacaggtatttcaagccaacaacgatgcaactgaggtggttctgaacaagctccacgctccactgctgacaaggtttgttagaatccgccctcagacctggcactcaggtatcgccctccggctggagctcttcggctgccgggtcacaggtgaggtgggggctccaatgaggttggggtgctgattgagccctaggctctgctccctttcaactctctgcaaacagcatgactgcaccacatgaccttcccagaaagactggctcaaggactcaagtcctaccagagtttgtcttttcattcattcattcagtatacatttattaagcatctacg

SEQ ID NO: 5324 - DNA, 399 bp, Homo sapiens
  misc_feature 1..399: note = U/M: U (0.09:0.9) in Thyroid Epithelium
  misc_feature 1..399: note = source = chr9:100431128-100431526; Gene: NCBP1 (intron)
  source 1..399: mol_type = genomic DNA
cgaagtgatgatgacgacagaagcagtgacaggaaagacggggttcttgaggaacaaatagaacgacttcaggaaaaagtggaatctgctcagagtgaacaaaagaatcttttcctcgttatatttcaggtatcttggcttgggacatttatacataaaaggaaacaatacatttctttagttttagtttttaaaaatgttatttttcattgtaaaaggaatacacattcatttatagaagagattaaaaatacaaaaatttaggaaggaaataaaagttcactactcagaggcaaccatgtatgtctgagtttctctgctgtttacttagtattctcgcatgagcatttctccatgcttgaaaaaaaattgtgggttgctttttttatatatgtctcg

SEQ ID NO: 5325 - DNA, 420 bp, Homo sapiens
  misc_feature 1..420: note = U/M: U (0.13:0.94) in Thyroid Epithelium
  misc_feature 1..420: note = source = chr16:1676814-1677233; Gene: CRAMP1L (intron)
  source 1..420: mol_type = genomic DNA
cgcctgtaaatattctccttgcctgtgtgctcactgtgtgcttttgtaaaaacatcatattggagcacagccatggccagggtcgatgtactgtctgcggctgatgccactgcagtggcatagttgaagagctgcaccagacagggtggcccttgaggccctggccagccactgctctgcttggccattcctgtgtggtcaaggatgactgagatccttccagattctgttgtcgtaagtaacgctgtggtgaacatcggtgtgcacgcttcatactttagactgcttctttggcatacagtattagaattaggttcgtgatcggtgagccttgttctttttttttttttggagatggaatctcactctgttgcccaggctggagcgcagtggtgcaatctgggctcactgcaacccccg

SEQ ID NO: 5326 - DNA, 464 bp, Homo sapiens
  misc_feature 1..464: note = U/M: U (0.13:0.93) in Thyroid Epithelium
  misc_feature 1..464: note = source = chr15:65241739-65242202; Gene: ANKDD1A (intron)
  source 1..464: mol_type = genomic DNA
cgatgaaagtcaattctttctccattcagagtgacaccaacagagtgcatagtgggtgttcaggagaaggcctggggctgaggaggttctagagaccaagacacaaacccttcccaccccatctgagaggctgctcctccactccccttacctatctccaggctgagcttgactggagcatggagaagggccttggaggcttttggcctctttcccacctgggcatgttcaggaggcggtgcagggtggcatagacaggcgctctggtcaagtggccccattggctccttctccctctctctctcctccctcactgttctcaggcaccaggagctatcaggagcacggccaccgaatgctgctcatttggctgcatggcgtggccacggctggtgagaaccccagcaaagcgctgttcgagggcctcgtggccattggcaggagggacctggctggtaagagcg

SEQ ID NO: 5327 - DNA, 469 bp, Homo sapiens
  misc_feature 1..469: note = U/M: U (0.12:0.92) in Thyroid Epithelium
  misc_feature 1..469: note = source = chr14:33392213-33392681; Gene: NPAS3 (Intergenic)
  source 1..469: mol_type = genomic DNA
cggccaggtgcggtggctcaagcctgtaatcccaacactttgggaggcggaggcgggcggatcacgaggtcaagagatcgagacgaccatcctggccaacatggtgaaaccccgtctctactaaaaatacaaagattagccaggcatggtggtgtgcacctgtaatcccagctactctgaagactgaggcaggagaaccacctgaaccagggaggctgaggttgcagtgagctgagatcgcaccactgcactccagcctgggcaatagagcgagactccatcccgaaacaaaacaaaacaaaacaaaacaaaacaacgacaacaaaaaacttggcatatggtaggtgcttaaggagagtttgtcaaaataaattcatgcatcaatgaaaggaagtatggaagttaagcaatttgccgcaagaccctggccaatattaaaatccaggaactctcactcaagttttccccg

SEQ ID NO: 5328 - DNA, 223 bp, Homo sapiens
  misc_feature 1..223: note = U/M: U (0.16:0.95) in Thyroid Epithelium
  misc_feature 1..223: note = source = chr3:195709678-195709900; Gene: SDHAP1 (intron)
  source 1..223: mol_type = genomic DNA
cggcaccgcagaaagggaggcgccagacagcgctgcccgcctggacctgccgttccctcagccagcgcaagttgctctcatgagcctgggccagctccccacatgacagctcctgctccggacggagccgccgtctcctcccaccacacacttgtcgatgcactcagccacagagaagtcactggtgttctaacaacctgcacattactgatccgtccccacg

SEQ ID NO: 5329 - DNA, 231 bp, Homo sapiens
  misc_feature 1..231: note = U/M: U (0.11:0.9) in Thyroid Epithelium
  misc_feature 1..231: note = source = chr21:44441320-44441550; Gene: PKNOX1,PKNOX1,PKNOX1 (exon,intron,intron)
  source 1..231: mol_type = genomic DNA
cgatccttggctgttttctccacctgcagttgtaagtacttggatatgtgagaatttcctatgctttctaatgttatttttcaactttaaaagcttcagttacagttaaaccaagatctcagcatcttgcatcaagatgatggttcatctaagaacaagaggggcgtcctgccaaagcatgccacgaacgtgatgcggtcctggctcttccagcacatcggggtaaggacg

SEQ ID NO: 5330 - DNA, 329 bp, Homo sapiens
  misc_feature 1..329: note = U/M: U (0.16:0.95) in Thyroid Epithelium
  misc_feature 1..329: note = source = chr2:60986229-60986557; Gene: PAPOLG (intron)
  source 1..329: mol_type = genomic DNA
cgcgggggctcacgcctgtgatcccagcaccgtgggaggccgagactgttggatcacctgaggtcaggagttcgagaccagcctggcaacatggcgaaactccgtctctactaaaaatacaaaaagtagctgggtgtggtggcacatgcctgtaatcccagctacttgggaggctgaggtaggagaattgcttgaacccaggaggcagaggttgcagtgagctgagatctccccaatgcactccagcctgggagacagagagagactccatctcaaaaaaaaaaagaaaaaaaagtctcagaacttctgttgtactttattcaagaccg

SEQ ID NO: 5331 - DNA, 190 bp, Homo sapiens
  misc_feature 1..190: note = U/M: U (0.16:0.93) in Thyroid Epithelium
  misc_feature 1..190: note = source = chr14:73391680-73391869; Gene: DCAF4 (Intergenic)
  source 1..190: mol_type = genomic DNA
cgctatctcggctcactgcaacccccgcctcccgggttcaagcaattctcctgcctcagcctcctgagtagctgggattacaggcgcccgccaccacgcccggctaattttttgtatttttagtagagttgggggtttcgccatgttggccaggctggtctggaactcctagcctcaagtgatccacccg

SEQ ID NO: 5332 - DNA, 352 bp, Homo sapiens
  misc_feature 1..352: note = U/M: U (0.15:0.92) in Thyroid Epithelium
  misc_feature 1..352: note = source = chr20:5433007-5433358; Gene: LINC00658 (Intergenic)
  source 1..352: mol_type = genomic DNA
cgtggtctcggctcgctgcagcctccctgtcccgggctcccgtggttctcctgcctcggcctgacgagtgcctgggattgcaggtacgcgccgccacgcctgactggtttttgtatttttggaggagacggggtttcgccctgttgaccgggctggtctccagctcctgacctcgagtgttctgcccgcctcggcctcccggggtgccgggattgcagacggagtctcgctcactcaatgctcagtgttgcccaggctggagtgcagtggcgtgatctcggctcgctacaacctccacctcccagccgcctgccttgacctcccaaagtgctaagattacagcctctgcccg

SEQ ID NO: 5333 - DNA, 222 bp, Homo sapiens
  misc_feature 1..222: note = U/M: U (0.1:0.86) in Thyroid Epithelium
  misc_feature 1..222: note = source = chr9:139134458-139134679; Gene: QSOX2 (intron)
  source 1..222: mol_type = genomic DNA
cgggcaatgggcgccctatccctgtgggacagctccacgcagggatgacagacagggagccaggcgccaagcagacagttctgagctggcaggtctgggctggggctgtggagaagcaggcatttctaacaaggccctaagtggccctactttgagagtcccagccttagaacagctccggggactcctcagtgccaagggcctttcatccctttctacccg

SEQ ID NO: 5334 - DNA, 234 bp, Homo sapiens
  misc_feature 1..234: note = U/M: U (0.19:0.94) in Thyroid Epithelium
  misc_feature 1..234: note = source = chr12:121756173-121756406; Gene: ANAPC5 (intron)
  source 1..234: mol_type = genomic DNA
cgcgatggtaggggaggaagatcgccagtacagctctgccacggacagtaggacactgaccgtaaagaggaaaacacaggatgagaagatccaccaccacatctccgtgagatgtacaagagaccccttacctgatcaccatttctgtgttcttcagtttctgacaatgaaccaacaatttttgtaaaagcttatgtgcctctgacatttggttctgagcttgtaatacaaccg

SEQ ID NO: 5335 - DNA, 349 bp, Homo sapiens
  misc_feature 1..349: note = U/M: U (0.16:0.91) in Thyroid Epithelium
  misc_feature 1..349: note = source = chr20:23968631-23968979; Gene: GGTLC1,GGTLC1 (promoter-TSS,intron)
  source 1..349: mol_type = genomic DNA
cgagatcaggccactggaatccaggctgggcgacagagggagactccatctcaaaaaaaaaaaaaaaaaaaaaaagagtctggctctgttgcccaggctggagtgcagtggcgtgatctcggcacatcacaatcccttccccacccccgggttcaagtgattcttgtgtctcaaccgccggagtagctgggactacaggcgcatgccaccatgtctgactaaatttgtatttttactagagacggggtttcgctatgttggccaggctggtctccaactcctgagctcgtgatccgtccgctccgacctcccaaagtgctaggattataggcataagccaccacgcccg

SEQ ID NO: 5336 - DNA, 398 bp, Homo sapiens
  misc_feature 1..398: note = U/M: U (0.18:0.93) in Thyroid Epithelium
  misc_feature 1..398: note = source = chr20:33903471-33903868; Gene: UQCC (intron)
  source 1..398: mol_type = genomic DNA
cgcttgagcccaggagtttgagaccagcctgggcaacatggcgaaaccccatccctacaaaaaaatacaaaaattagcctggcatagtggtgcatgactgtagtcccggctacttgggaggctgaggtgcatcacttgagcctgggaggccgaggctgcagtgagccaggatcgcgccactgcactccagcctgggcaacagaacaagagcctgtctcaaacaaacaaaaactcagagactgttttagaaatgcaattctggtgagatggttgagagcccagtagaactcctctctcctcttggggaacagcctggcctggaggatcttcagggcccagagtgcagttcgctgaatgccttcaatagggtacaactctgacctccagacagtaacacg

SEQ ID NO: 5337 - DNA, 189 bp, Homo sapiens
  misc_feature 1..189: note = U/M: U (0.17:0.91) in Thyroid Epithelium
  misc_feature 1..189: note = source = chr22:31522899-31523087; Gene: INPP5J (intron)
  source 1..189: mol_type = genomic DNA
cgctgcaggtgagttcggtgaggatgcagggtgtcatcctgctgctgttcgccaagtactaccacctgcccttcctgcgagacgtgcagaccgactgcacgcgcactggcctgggcggctactgggtgagcctgtgagcaggcccagaagaggatgggacatgaagggggctttagattagtccccccg

SEQ ID NO: 5338 - DNA, 211 bp, Homo sapiens
  misc_feature 1..211: note = U/M: U (0.19:0.91) in Thyroid Epithelium
  misc_feature 1..211: note = source = chr11:72146423-72146633; Gene: CLPB (promoter-TSS)
  source 1..211: mol_type = genomic DNA
cgtctccctggtccaagcgattctcccacctcagcctaccgagtagctgggattacaggcacgcaccaccacgcttggctaatttttgtatttttagtagtagagacggggtttcaccatgttggccaggctggtctccaactcctgacctcaagcgacccacctgcctcagcctccctaagtactgggattactggcgtgagccactgcg

SEQ ID NO: 5339 - DNA, 397 bp, Homo sapiens
  misc_feature 1..397: note = U/M: U (0.19:0.91) in Thyroid Epithelium
  misc_feature 1..397: note = source = chr2:231530504-231530900; Gene: LOC151475 (Intergenic)
  source 1..397: mol_type = genomic DNA
cgggtgcctgtaatcccagctacttgggaggctgaggaaggagaattgcttgaaccctggaggcagaggttgcagtgagccaagattgcaccactgcactccagcctgggtgacagaatgagactccatctcaaaaaaaaaaaaaaaaaaaaaaacccaccctggaaacagggagagaatcagagcgaaagcttccagttcaaacgcaggttgagaatgaggtttgcagagccagcgggcagtgagtgctgaccgagaagacccatggcggcccactgcagtgggggcggcggcagtgtgaccttgttgaaactagccgctccagtgacccaaggctgggggagatttggctctgctactttccagcactgtgagcttgggagccttacctgctccg

SEQ ID NO: 5340 - DNA, 93 bp, Homo sapiens
  misc_feature 1..93: note = U/M: U (0.23:0.94) in Thyroid Epithelium
  misc_feature 1..93: note = source = chr6:3070673-3070765; Gene: RIPK1 (Intergenic)
  source 1..93: mol_type = genomic DNA
cgtgtatttttatttttgagacagagtcttgctctgtcacccaggctggagtgcagtggcgcgatcgcggcttaatgtaaccttcgcctcccg

SEQ ID NO: 5341 - DNA, 311 bp, Homo sapiens
  misc_feature 1..311: note = U/M: U (0.27:0.96) in Thyroid Epithelium
  misc_feature 1..311: note = source = chr4:1738884-1739194; Gene: TACC3 (exon)
  source 1..311: mol_type = genomic DNA
cggttagcttgtccacatggtcctctgtgtcctactcaacactgggagggcctagtgactgaggctgcctctgcttggtggcagcatgcacggtgcaaatgagactccctcaggacgtccgcgggaagccaagcttgtggagttcgatttcttgggagcactggacattcctgtaagtccttgagtccctcttgaactgtcttgtgtgtggtctgagggaacgagttgttttaagggcctatattttctattcctgggggtctgagcctttggttttgttgggggcatggggccgctgtgctgttccctcg

SEQ ID NO: 5342 - DNA, 418 bp, Homo sapiens
  misc_feature 1..418: note = U/M: U (0.28:0.95) in Thyroid Epithelium
  misc_feature 1..418: note = source = chr15:91268331-91268748; Gene: BLM (intron)
  source 1..418: mol_type = genomic DNA
cgttttgccatgttgtccaggatggtctcaaactcctgacctcaggtgatctgcccgtctcggcctcccaaagtgctgggattacaggcataagccaccacgcccggcccccagaggaaggttttattgaattaattacaaactgataggtcaaagagtgtgtatgttttaccttactatgtaatactaaattgttttcaaaagtgcttgcactcccaccaatgtattagattttccgttgctctgcatgctggctaatactttatatttacatttttattttccaatctggtatattcatgtatagtagtattttctggtagcattcatttctctgattattagtgaagatgagtaccctgatgtgtttatgggctatttcctcttttttacagtccctttttttttttttgaggcg

SEQ ID NO: 5343 - DNA, 422 bp, Homo sapiens
  misc_feature 1..422: note = U/M: U (0.25:0.92) in Thyroid Epithelium
  misc_feature 1..422: note = source = chr9:127120341-127120762; Gene: LOC100129034 (exon)
  source 1..422: mol_type = genomic DNA
cggcgccttcccagtccacgagggcgtgagagtacatacacatgcaagtgcactccagcgctcacccaagcaacacccttggagaaacacggactccaggcccaaatccagcctgagaccctcaaagggcagatccgctaacctcaagttttcagaagatctgaacccactgggggctcctgctcctctgcctgccccatgccagactaggattccagtgacataagcgccctctacagactcagaaggacagagaaggttctgctggaagtgggctcctcagcaaaccagcagataggggttcctttgatatttataccccaggttttttcactctcacgtgacatctatgtggggccaatgaagccaattcttcttttgtacatatgcagtcctgtaagaatgcattcaaacgggatccg

SEQ ID NO: 5344 - DNA, 396 bp, Homo sapiens
  misc_feature 1..396: note = U/M: M (0.87:0.14) in Thyroid Epithelium
  misc_feature 1..396: note = source = chr13:109567908-109568303; Gene: MYO16 (intron)
  source 1..396: mol_type = genomic DNA
cgttacatttggggaacgaatgtaatttctgcttttgggaattgagatttaatgaaagccagaaatagtcattcattgtttatcttcagcatactttaaatagcttagatgggtttagtcccagaaaagctaggttcctaaatccaaaaagttattctgaatctctttttgtattgattaatggtggaaatgattgtggtgctgcaggataacatttgtgagtaaaggtcaaattttgaatgctaagttgaaaacaagcagtgtttgactcagagcatgtgacctgtttctaacccatgtggccatgaaaggaaaagctgagtcaccgcgcgcttgaacttgtgatcctgctgggagccgtacctgtcacggggaagccacggcaagcagctcccg

SEQ ID NO: 5345 - DNA, 183 bp, Homo sapiens
  misc_feature 1..183: note = U/M: M (0.75:0.06) in Thyroid Epithelium
  misc_feature 1..183: note = source = chr4:140476076-140476258; Gene: SETD7 (intron)
  source 1..183: mol_type = genomic DNA
cgtcagaacttgtgtttatacaaatcagacagaaaccagattcaaccaacagctaaaaattatttactcacatgcttagtttaaaacattctggtatcataccacaccacactgaaaaacatcacgacgtactgtatggagtggaaccaaataaatacgctaaagagtattttccagtattcg

SEQ ID NO: 5346 - DNA, 396 bp, Homo sapiens
  misc_feature 1..396: note = U/M: M (0.79:0.13) in Thyroid Epithelium
  misc_feature 1..396: note = source = chr3:150479084-150479479; Gene: SIAH2 (intron)
  source 1..396: mol_type = genomic DNA
cgtagacaagtatgtctgtgaaactgctcctgaaggtttccacgtaatagctgcaggtaaacaaatgttataatatgaccacacaatgcaatactatgcagccatttaaaatacaatgaagtcgactaggtttcaggcatagagaaatatgtgtgataatatgaatttaagaacagcaagttgcagatgccatttttggagaaaaacttacatctatgtgtgggtattaaaaaacctccctgacatacactgacatctatgattctatatttagctgcgagggtgtatgtatatatagtttaaaaagatacacactaaacctaacaatggtgggaaaggaggggagagatcttggtctttcattttacttcttgtcttggtggcttgcatttttcg

SEQ ID NO: 5347 - DNA, 248 bp, Homo sapiens
  misc_feature 1..248: note = U/M: M (0.76:0.11) in Thyroid Epithelium
  misc_feature 1..248: note = source = chr11:113648895-113649142; Gene: CLDN25 (Intergenic)
  source 1..248: mol_type = genomic DNA
cgttttcttctctgtctcgctataaagactaagcctcacccacatgatgtgtcaccagtgtgcaggggcagctgctgcagcctggggacaagaacatcaaatgtccgagtctgagctgcctggttcgtgttggatctgttgtttaccagctgggggaccttggcaagttacgtaacatgtatcacacagtggcagtgtgaaaattaaatacggataaagtgtctagccaaaagtctggcatttagccg

SEQ ID NO: 5348 - DNA, 343 bp, Homo sapiens
  misc_feature 1..343: note = U/M: M (0.72:0.07) in Thyroid Epithelium
  misc_feature 1..343: note = source = chr4:186316500-186316842; Gene: ANKRD37 (Intergenic)
  source 1..343: mol_type = genomic DNA
cgtgtctgataccctttattagttaggaattcctgaaaatgaacttctgtgcaaacctgaagcttcaacacgtgttttaaaaagcagtgcttattgaattgataaacaaaagcgaaactggcaatatcaacgtgtgctcacctcacaaatctgacaacagtatctctacactgccgttctttaaacatcattaaaagatattgtgaatagtttaaatattaaaaatgtggaatataagaacgattctatatatttgaacacacatttatattcaaatattcatatgaataaaaatgcttaaaactaccccttgggtaactaagtataacaacataaacttgcg

SEQ ID NO: 5349 - DNA, 382 bp, Homo sapiens
  misc_feature 1..382: note = U/M: M (0.71:0.06) in Thyroid Epithelium
  misc_feature 1..382: note = source = chr2:64370060-64370441; Gene: PELI1 (intron)
  source 1..382: mol_type = genomic DNA
cgaaacagatgaccttttcttatatataaagcttcagtttttagcacaaccagcaccttatgaataaagttctcaataacatttgttgatatactgtttgatgactaaacgacaggaatattgttggtgctgttaaaaccaaggcacatttccttgtgtgtagtgattaaaatctgttaaatgtacatttttaaaaaacctctgccctctgtccccttcttgctctcttgcctctaacagacctgcacgtacaaaaataaaagtagatggtgacgtgagtttatgatttacattaatttccctactcggagcatttttcactaagtctttagaggttttaagattcaaacactatgtaagaagaattatggtttgaactacg

SEQ ID NO: 5350 - DNA, 146 bp, Homo sapiens
  misc_feature 1..146: note = U/M: M (0.82:0.18) in Thyroid Epithelium
  misc_feature 1..146: note = source = chr10:7527240-7527385; Gene: SFMBT2 (Intergenic)
  source 1..146: mol_type = genomic DNA
cgttaaatcagtgattcttagcagagctatttctgctagatgatattgttgggtgctgggaaggaggtgccgataatgagaaggaagtagccatcgcaagttggcaaaactcccgaggaagtttaaaaaaaaaaaaataacttccg

SEQ ID NO: 5351 - DNA, 208 bp, Homo sapiens
  misc_feature 1..208: note = U/M: M (0.8:0.17) in Thyroid Epithelium
  misc_feature 1..208: note = source = chr19:1258902-1259109; Gene: MIDN,MIDN (exon,TTS)
  source 1..208: mol_type = genomic DNA
cgatttttaaataacgtctgtgcctccactggttgagggtggaacctccaggcaggaaccggctcgccaccctctgcccggtaagggctgcccaagaaagcattacccgccctcggggggtcgggctgtgggggtcccggcacctggcgtgagtttcatgtatgaaaacataaaattgaaaaaaaaaaaaaaacctacacgagcaccg

SEQ ID NO: 5352 - DNA, 241 bp, Homo sapiens
  misc_feature 1..241: note = U/M: M (0.74:0.12) in Thyroid Epithelium
  misc_feature 1..241: note = source = chr6:128839793-128840033; Gene: PTPRK (intron)
  source 1..241: mol_type = genomic DNA
cggtttcaatgctaacgggcattatatgtcagaaatgcatgcagtaatgcttactccagaaagaattcaattaaaccattggattattttttgcatagagctgttaccctctgcgtacatcaattatatacagggcttttcctctgcgtgctgccatttcataatctctgcctgaatgtacgacacatgctgccacctgaatctgttgtttaactccctttacagagttctaaatggggcg

SEQ ID NO: 5353 - DNA, 396 bp, Homo sapiens
  misc_feature 1..396: note = U/M: M (0.7:0.08) in Thyroid Epithelium
  misc_feature 1..396: note = source = chr15:96883151-96883546; Gene: NR2F2 (exon)
  source 1..396: mol_type = genomic DNA
cgttaatattcagatccagtcaatacatgcagaccagtaaaatctgatttgtgcagagttctccatctgactctcacttatttctgtagatatatacatatataaatacaagtatgttcttacggcacagtattgctgacctttagttcgaggttttgtcggttgttgttgattttcttcctcttgcaagtgctatccatgtgagtgtgtgaagtttctctaataagtaaaacacaggcccttttccttgtttgttttgtgttagtttattgtaaacagccatttgttgtaaattattattggcattaaattataatttatgattttcaaagcaaaagacaatccctgttttattatgctttaagcatgtgttctagacgttggaaatctctctcg

SEQ ID NO: 5354 - DNA, 254 bp, Homo sapiens
  misc_feature 1..254: note = U/M: M (0.67:0.06) in Thyroid Epithelium
  misc_feature 1..254: note = source = chr14:81462751-81463004; Gene: TSHR (intron)
  source 1..254: mol_type = genomic DNA
cgtctatgatctagtaagtgacgatgactggtttattgcaaaattttctgaatcactttgctctgtcagattaagctttcagctaaccagcagagggagcacaaagagacacactggtttcatctcagtgtacagggagtctagttactaagtggacgaagaactcccgcacattgagatctggtcctcaactggcaagaagcactgttcgagcaatcaggaaaatctgggctttaagcagtggcaccactacg

SEQ ID NO: 5355 - DNA, 93 bp, Homo sapiens
  misc_feature 1..93: note = U/M: M (0.68:0.08) in Thyroid Epithelium
  misc_feature 1..93: note = source = chr1:149333641-149333733; Gene: FCGR1C (Intergenic)
  source 1..93: mol_type = genomic DNA
cgtccagtttttggcctgaacgtgtggagggtggagttgccattaactaacgtgagaaaaggcaggtgtagtacgttgtagagaaaatatccg

SEQ ID NO: 5356 - DNA, 66 bp, Homo sapiens
  misc_feature 1..66: note = U/M: M (0.68:0.12) in Thyroid Epithelium
  misc_feature 1..66: note = source = chr1:149333740-149333805; Gene: FCGR1C (Intergenic)
  source 1..66: mol_type = genomic DNA
cgttcagggccctggggtcttccttgaaagagttttccatccaggccgtctcggtttccgcatccg

SEQ ID NO: 5357 - DNA, 326 bp, Homo sapiens
  misc_feature 1..326: note = U/M: M (0.61:0.05) in Thyroid Epithelium
  misc_feature 1..326: note = source = chr14:90865037-90865362; Gene: CALM1 (intron)
  source 1..326: mol_type = genomic DNA
cgaggtgggactgttctccccataaggtgacagtttctcttgcgaggtgtggcagcgcttcctgttgtacaagacagatgttgccttggcgttacgtaaatcatcgtgtctccgtcatttaaagaaagccaatttttagtgattgaggtagaaagaaagatccgtttataatttgtaaaaacaaattttcacccagaatcaatatattggaacaccattcctactgttaaagttttcacttaagagtataaacttcatcagctttctattaggacttattttgtaattggcttcttaggcatccttctttaaaagagaaatccacg

SEQ ID NO: 5358 - DNA, 309 bp, Homo sapiens
  misc_feature 1..309: note = U/M: M (0.58:0.04) in Thyroid Epithelium
  misc_feature 1..309: note = source = chr11:128377113-128377421; Gene: ETS1 (intron)
  source 1..309: mol_type = genomic DNA
cgagccgggctccaccctccatgagtaaataaaggcagggacggagggagggagagggaaggagagggagcggagtgggcagacaggaaccagaaggccagcgctggttcagggaacacaccagatgagatttcagcgacgggtggtgtggcagaattcaagacataattctctgagccttacacaccactccagttgggattcagccctgccttggcagccggctcagtgctgctttataatatactgaattagtcactggattagcaagcacatttacacacagtggcgcacagctgtttaaagacg

SEQ ID NO: 5359 - DNA, 263 bp, Homo sapiens
  misc_feature 1..263: note = U/M: M (0.88:0.15) in Thyroid Epithelium
  misc_feature 1..263: note = source = chr10:8102090-8102352; Gene: GATA3 (intron)
  source 1..263: mol_type = genomic DNA
cgactgcctgagcaggactgtctctatttagttgatatgttttagctaatccaattattttcagactgctgcacgcgacagttgcattgtttatcctgagccaggaactttaatagagtccggatgcggttaggctgacagaagaacccagacctgcatgttcagtacatgaaagtaggcaggagggagagggaggcaggctagctggtggagtcaaaaagaaagcaagaggccgggagagctggaggcacaaagtggccacg

SEQ ID NO: 5360 - DNA, 309 bp, Homo sapiens
  misc_feature 1..309: note = U/M: M (0.86:0.08) in Thyroid Epithelium
  misc_feature 1..309: note = source = chr11:57244279-57244587; Gene: RTN4RL2 (TTS)
  source 1..309: mol_type = genomic DNA
cggcgctgcctgccaggcgcccccggactcccgaggccctgcgctctcggccgggctccccagccctctgctttgcctcctgctcctggtgccccaccacctctgactgcggtgctgagatcgaagaggccagtgtccgatccccgcttcccgtccacccggggctgcggctccggccccagtcgccccaccttccctggccttgctgcctccctttcccctcccagctcctctcctccccggggagcaggccgcctctccttgcctgccccctgggctgtcctgacttgtggcagccccaagagggcg

SEQ ID NO: 5361 - DNA, 58 bp, Homo sapiens
  misc_feature 1..58: note = U/M: M (0.93:0.17) in Thyroid Epithelium
  misc_feature 1..58: note = source = chr10:88023129-88023186; Gene: GRID1 (intron)
  source 1..58: mol_type = genomic DNA
cggcagcggggaggatcccgcctctcccagctcgtcagaatccaggcccaacgggacg

SEQ ID NO: 5362 - DNA, 494 bp, Homo sapiens
  misc_feature 1..494: note = U/M: M (0.75:0.04) in Thyroid Epithelium
  misc_feature 1..494: note = source = chr11:46582020-46582513; Gene: AMBRA1 (intron)
  source 1..494: mol_type = genomic DNA
cgggaaagcttgtgctcaaaacaaagtgtgatcaaaaccggaaatagaaagcaataagacccaaatttgagactgacaattttccttactcccacttacctcagaaggatgaagaaaaaagaaacggaagttttatctgcaaattattctggagaaaacagtgtgctgagaacacaagaactcctaaaaacggaaggaagaacaaggaggaaagcactaaaccaagaagaaactgaagctcaattttttggtttcaagctatcaaaagaatcaagaagaccaagaaggctactcttaaatgtacagaaatggcaaaagatttcctattagcaagcaacaaaaaaagagtagcttctgatggaagaaatttcagaggcaaaacagcttaaccccagaaacggaaactgaaaccagctgcctcaaacagacctaatgactttggcaacaatatacctttcatccaccaacaatatcaggaggctggagtagggccg

SEQ ID NO: 5363 - DNA, 145 bp, Homo sapiens
  misc_feature 1..145: note = U/M: M (0.8:0.12) in Thyroid Epithelium
  misc_feature 1..145: note = source = chr9:100503872-100504016; Gene: XPA (Intergenic)
  source 1..145: mol_type = genomic DNA
cgcctccgcgctgcccagtgctgccggttatctgctcacagcgggtggctccgggccttcaggagcgcgacgggcgccatcccttccagtgcctcccgggacaaggccagggtcatcggcacacggagtttcagcccgagtgccg

SEQ ID NO: 5364 - DNA, 325 bp, Homo sapiens
  misc_feature 1..325: note = U/M: M (0.81:0.13) in Thyroid Epithelium
  misc_feature 1..325: note = source = chr13:45991122-45991446; Gene: SLC25A30 (intron)
  source 1..325: mol_type = genomic DNA
cgtacttttgaacgctttccaagtttctcttatttatttatttagaggcggagttttgttcttattgcccaggctggagtacaatagcatgatctcggctcactgcaacctccgtctcctggattcaagcgattctcctgtctcaacctcccgagtagctagaattagacatccgtcaccacgcccggctaattttgtatttttagtagagacggagtttctccatgttggccaggctggtctcgaactcctgacctcaggtgatccgcccgcctcggcctcccaaagtgctgggattacaggcctgagccaccgctcccagccg

SEQ ID NO: 5365 - DNA, 205 bp, Homo sapiens
  misc_feature 1..205: note = U/M: M (0.75:0.08) in Thyroid Epithelium
  misc_feature 1..205: note = source = chr3:44039086-44039290; Gene: MIR138-1 (Intergenic)
  source 1..205: mol_type = genomic DNA
cgaaaataagatacttactaatttaatagggccgttcctttttacataagatgctcccccaccccccaccaatttacaataggtaaactttgagcttcctcaaagtttcgctatctagcgtttatgcccgaagctttacgaataaactccctttccaggtaaacctgcccaacccttgtcctatgcccagcgaagcccaggtacg

SEQ ID NO: 5366 - DNA, 143 bp, Homo sapiens
  misc_feature 1..143: note = U/M: M (0.61:0.06) in Thyroid Epithelium
  misc_feature 1..143: note = source = chr7:150784966-150785108; Gene: AGAP3,AGAP3 (exon,intron)
  source 1..143: mol_type = genomic DNA
cgcaagccctggtgtggtgggtgctggaggcacccgcaggcaccccggtggcatggtgaccttcgagcgggcacggacagatgggcctcaccctgggccatctgcttcctcccccagctctgtttgaaaggggacgcccaccg

SEQ ID NO: 5367 - DNA, 259 bp, Homo sapiens
  misc_feature 1..259: note = U/M: M (0.6:0.06) in Thyroid Epithelium
  misc_feature 1..259: note = source = chr14:75413103-75413361; Gene: PGF (intron)
  source 1..259: mol_type = genomic DNA
cgcagaggcctagggaaacagacagagagaggggcagaggaacgttaggaaagcaataagtggggctccctgccgcccggacaggtcccctccgacatccccagtcctggtcctgcagctgacactgaggccactagggggtagcatggagttggcaagggagaggtggccagagcctcaaggcttcactcccactccaggctctggtgaccccaccacgagagggacaaatcaacctcctggggacccctgccacccg

SEQ ID NO: 5368 - DNA, 196 bp, Homo sapiens
  misc_feature 1..196: note = U/M: M (0.57:0.06) in Thyroid Epithelium
  misc_feature 1..196: note = source = chr8:37595216-37595411; Gene: ERLIN2 (intron)
  source 1..196: mol_type = genomic DNA
cggtgggggctctaattttacagttaaagaaaggggaacgttgactgagaacgaggaggaagcgagttgtagatctagccttgtgttcacacgacaccaggctggatatgagtcactcgcagggagctcagcttggtgaggtcctctcgctgttgtggccttttctcctgcacgttggaccacacacattttcccg

SEQ ID NO: 5369 - DNA, 330 bp, Homo sapiens
  misc_feature 1..330: note = U/M: U (0.17:0.83) in Adipocytes
  misc_feature 1..330: note = source = chr7:134849833-134850162; Gene: C7orf49 (TTS)
  source 1..330: mol_type = genomic DNA
cgctgatctccagctccagcgatggaacccactacagaggaggtggggcccctgtgtcaaagaggccgaggggcagcaagggcagccagggcacctgtgacttcttagtacaagattgtctgtccttcaggacttccaaggctcccaaagactccctaaaccatgcagctcattgtcacaccaattcctgctttaattaatggatctgagcaaatcttcctctagcttcaggagggtggggagggagtgattgctgtcatggggccagacttccaggctgatttgccaaatgccaaaatgaaacctagcaaagaacttacggcaacaaac

SEQ ID NO: 5370 - DNA, 155 bp, Homo sapiens
  misc_feature 1..155: note = U/M: U (0.29:0.92) in Adipocytes
  misc_feature 1..155: note = source = chr11:27502491-27502645; Gene: LGR4 (Intergenic)
  source 1..155: mol_type = genomic DNA
cgagtagctgggattacaggcatgtgccaccgtacctggctaattttgtatttttagtagagacagggtttcttcctgttggttagtctggtctcgaactcctgacctcaggtgatctgcccgcctcggcctgccaaagtgctgggattacaggc

SEQ ID NO: 5371 - DNA, 40 bp, Homo sapiens
  misc_feature 1..40: note = U/M: U (0.27:0.9) in Adipocytes
  misc_feature 1..40: note = source = chr11:62304487-62304526; Gene: AHNAK (intron)
  source 1..40: mol_type = genomic DNA
cggatctcggctcgctgcaagctccacctcccgggttcac

SEQ ID NO: 5372 - DNA, 490 bp, Homo sapiens
  misc_feature 1..490: note = U/M: U (0.3:0.9) in Adipocytes
  misc_feature 1..490: note = source = chr1:110426640-110427129; Gene: CSF1 (Intergenic)
  source 1..490: mol_type = genomic DNA
cggctttcccatgagcccagcgtggtgctagaggcctagaatggggtgggggaggaagacaccagaaatatgagccagtgtctgccttcaaggggtctgtaaaatagttggagaaagtaagcaagcacatgcaaatcagaacatggttaagacaggttaaatagcagaccataggtgaccaaatgcagtggggtagggaatgtcctatccactgtgcctaaacactggcttctggtcttttattttttgtctttccttcaaccatccccccagcccacacaaagtcccttgcataacagggccagcagtcaaggctagggaacaatttcctagtaaatcagggactctgtgaagccttggcaacatctcaattctcatcttgaatttataactctcagggctctcactgctggccaccaaccccagcacaccaccaacatcttcagtttattgactgacaggctgattatcgctgtgcgaggcggccagc

SEQ ID NO: 5373 - DNA, 238 bp, Homo sapiens
  misc_feature 1..238: note = U/M: U (0.27:0.86) in Adipocytes
  misc_feature 1..238: note = source = chr12:109595371-109595608; Gene: ACACB (intron)
  source 1..238: mol_type = genomic DNA
cggctctttcttggtccgttgagactctgtgtggaagtcgctggtcttgagtactgccctgggtcagcacaaacattgatgaaaactaataagtaaagacagagttcggttatgaaagagccctctggagttgggaggcatttgggatcttgtgctgaaggctcgggccatctaagaagccagaactcctgagaaggtgaggtcgcaaatgatgactgatttttcatggcatgagaac

SEQ ID NO: 5374 - DNA, 382 bp, Homo sapiens
  misc_feature 1..382: note = U/M: U (0.25:0.84) in Adipocytes
  misc_feature 1..382: note = source = chr5:79945953-79946334; Gene: MTRNR2L2 (exon)
  source 1..382: mol_type = genomic DNA
cggttagggtaccgcggccgttaaacatatgtcaccgggcaggggtgcctctaatactgataatgctagaggtgatgtttttggtaaacaggtggggtaaggtttgccgagttccttttactttttttaacctttccttgtgggcatgcctgtgttgggttaacagtgggggtaataatggcttgttggttggttgtagatattaggctgttaattgtcagtttaatattttggtctgatgtaggcttatgtggaggagaatgctttcatgttacttataccaacgttagttcttctataaggtaatagattggtccaattgggtgcaaggagttcagtcatatgtttgggatttttcggatgataggtgttgagcttgaac

SEQ ID NO: 5375 - DNA, 52 bp, Homo sapiens
  misc_feature 1..52: note = U/M: U (0.22:0.8) in Adipocytes
  misc_feature 1..52: note = source = chr5:99388792-99388843; Gene: LOC100133050 (Intergenic)
  source 1..52: mol_type = genomic DNA
cggacgggggcctcaactgggaggaccacccggttatcaacgtcaaggagtc

SEQ ID NO: 5376 - DNA, 222 bp, Homo sapiens
  misc_feature 1..222: note = U/M: U (0.3:0.88) in Adipocytes
  misc_feature 1..222: note = source = chr11:75537042-75537263; Gene: UVRAG (intron)
  source 1..222: mol_type = genomic DNA
cggctaatttttgtaattttagtagagatggggtttcatcacgttggccaggctggtctcgaactcctgaccttaggtgatccacccaccttggcctcccaaagtgctgggattacaggcgtgagccactgtgcctggccaagaacttgtttcgttttctttcctttttttttcttttaagacggagtcttgctctgtcgctaggctggagtgcagtggcac

SEQ ID NO: 5377 - DNA, 386 bp, Homo sapiens
  misc_feature 1..386: note = U/M: U (0.3:0.88) in Adipocytes
  misc_feature 1..386: note = source = chr6:155357994-155358379; Gene: TIAM2 (Intergenic)
  source 1..386: mol_type = genomic DNA
cgcctgccttggcctcccaaagtgctgggattacaggcatgagccaccgcgcctggcctggagaaattcttaaagttcagacatttaaaattattgttagagtcagggcccagggaatttcgcctttgtccttaggcacggctctctataactttttcagtttcccttcacctaattgttacttcatggtttcctgtcctgtagttcaagaacattcttctaagctgccttggcaacttgtagtgtcccaggaggaacatctttggcgttagctctgattccgttcttttcttcttgaactattgcttgtaaatgttcaatgtaggtaaattttctgagcttcaattttctcatctgtaaaatgggggcagtaaaatactgacctc

SEQ ID NO: 5378 - DNA, 74 bp, Homo sapiens
  misc_feature 1..74: note = U/M: U (0.24:0.82) in Adipocytes
  misc_feature 1..74: note = source = chr5:99388999-99389072; Gene: LOC100133050 (Intergenic)
  source 1..74: mol_type = genomic DNA
cgtagggatgggagggcgattaggactaggataatagtgggtaggatcgttcagacggtttctatctcttggac

SEQ ID NO: 5379 - DNA, 500 bp, Homo sapiens
  misc_feature 1..500: note = U/M: U (0.29:0.85) in Adipocytes
  misc_feature 1..500: note = source = chr17:47692960-47693459; Gene: SPOP (intron)
  source 1..500: mol_type = genomic DNA
cgatctcctgggctcaagtgatcctcttgcatcagcctcaggagtagctgggaaccacaggggtgggccaccactcctgactcttatgtctctctctttcattaccaaagtaaatgctctgtcaagaaaacttgggacccgagtttgtgcttccttgggtgaatggcattcagctccacttagtgtagtgcagcggactagagatagaaaatagggagctgacatgaccctcgcactagtttgctgcacaatgttaggaaaaatttcctgactccctgggcactgcttctctccccttgtaacatgaaatgaagaaaacagaactaaacctagctcaaaggattgtaataagggacaattcaggaaatgctttggaaatgcttccaaataagttaactaagcaataacaacttggaagaactgccacatttcctaataggtaaaacatcactgagaactgaaagtgatctcagtgtctacagtcatatcaccctgaacac

SEQ ID NO: 5380 - DNA, 214 bp, Homo sapiens
  misc_feature 1..214: note = U/M: U (0.33:0.88) in Adipocytes
  misc_feature 1..214: note = source = chr19:5714972-5715185; Gene: LONP1 (intron)
  source 1..214: mol_type = genomic DNA
cgctctaacgctgtgtagattattctctggggacatgctgatccgcatcctggatactaatcaacatggtttgggaacgcctaaacaaaaaaaaaaaaaaaaaaaaaaaagtgctggaggccaggaggctgtggtggtgaatacagtgagcagaactgaccagctggattcttcttagcggtttccccactcccaaaggaaattcaaagtagac

SEQ ID NO: 5381 - DNA, 220 bp, Homo sapiens
  misc_feature 1..220: note = U/M: U (0.35:0.9) in Adipocytes
  misc_feature 1..220: note = source = chr10:71232978-71233197; Gene: TSPAN15 (intron)
  source 1..220: mol_type = genomic DNA
cgatcatggctcgctatagccttgatctcctgggctcaagcgatgggaggagggctttgagctgagcttggaggatgggtatgagccccttttggctttagtatttccaggaaactgtctcctttccaaggctgctatgggaggcagtgctggaggtgtgtgccttcatcaaggctggggagggaaggcattgctgtccgctttagggttttacccttgc

SEQ ID NO: 5382 - DNA, 398 bp, Homo sapiens
  misc_feature 1..398: note = U/M: U (0.34:0.89) in Adipocytes
  misc_feature 1..398: note = source = chr12:125111263-125111660; Gene: NCOR2 (Intergenic)
  source 1..398: mol_type = genomic DNA
cgggagcagggtagggggttgggtgggagcctgtgacatgttttaatgaagtgtagacattttaaatatacaattcaaagacttttttaaaaatcttaagtacatatgtttttagagacagggtctcacgctgtggcccaggctggagtacagtgacaccatcataactcactgcagcctcgaacgcctcagctaaagcaatcctcccgcctcagcctcccagcctcccaagcagctggcagtgcagatgtgcaccaccatactcagctaatttaaattttttttttttttagagatgggatcttgctgtgttgcccaggctggtctcaaacttttgggctaacgcaatcctcccacctcaggctcccaaggcattgaaatcacaggcatgagccacc

SEQ ID NO: 5383 - DNA, 80 bp, Homo sapiens
  misc_feature 1..80: note = U/M: U (0.33:0.87) in Adipocytes
  misc_feature 1..80: note = source = chr6:62284239-62284318; Gene: KHDRBS2 (Intergenic)
  source 1..80: mol_type = genomic DNA
cgacgaggtttcagctgtctcttactttcaaccactgcaactgacctgcccgtgaagaggcggacataatacaacaagac

SEQ ID NO: 5384 - DNA, 360 bp, Homo sapiens
  misc_feature 1..360: note = U/M: U (0.31:0.85) in Adipocytes
  misc_feature 1..360: note = source = chr7:95237088-95237447; Gene: PDK4 (Intergenic)
  source 1..360: mol_type = genomic DNA
cggccttgggattcgtcccaacgcaggactccagagatcagtggatcagtgaattatgtttgggagatgcaacccctgttgttactgggctgggggcccaagcagctgctggtggggtgttctgccctgcagcagcaccctacctccaccctcccctttacatttagaagaactgtcctttagtgagactgtcaatggaaaacatgaaaatcattcatttaatccaacattttcaatcgcagaggaaaaacaagcagaagagttaagtcaccagagtcatacagctggtaggaaaaatgggttctctaaatctcagtttaaacagaaatccttgtcacactcttctggggattgagaagc

SEQ ID NO: 5385 - DNA, 286 bp, Homo sapiens
  misc_feature 1..286: note = U/M: U (0.3:0.83) in Adipocytes
  misc_feature 1..286: note = source = chr5:134261080-134261365; Gene: PCBD2 (intron)
  source 1..286: mol_type = genomic DNA
cgaatatcttgttcattgttgaggttgtggatgatggatccggagcatataaatagtatggctttgaagaaggcgtgggtacagatgtgcaggaatgctaggtgtggttggttgatgccgattgtgactattataagtcctagttggcttgaagtggagaaggccacgatttttttgatgtcattttgtgtaagggcgcagactgctgcgaacagagtggtgatagcgcctaggcatagtgtgagagtttggattagtgggttattctctgctagggggtggaagc

SEQ ID NO: 5386 - DNA, 176 bp, Homo sapiens
  misc_feature 1..176: note = U/M: U (0.35:0.87) in Adipocytes
  misc_feature 1..176: note = source = chr15:73988788-73988963; Gene: CD276 (intron)
  source 1..176: mol_type = genomic DNA
cgtaggggtctctgggtgccgtggactcttctggtctctttgcttctgggctgtcaaactgcttctctccagggcaggtttccaggatccagagtctaggaaaggaatgaaagggagcaagtccagggcgcagccctggaagtccctcatcttccctctggagggaagcgcagctc

SEQ ID NO: 5387 - DNA, 327 bp, Homo sapiens
  misc_feature 1..327: note = U/M: U (0.32:0.84) in Adipocytes
  misc_feature 1..327: note = source = chr11:93266034-93266360; Gene: C11orf75 (intron)
  source 1..327: mol_type = genomic DNA
cgtgtattttaatcactattgtctgtcatcctcactagaaaataggccccatgagaacaggattttggctccttctgttcagtgcaaaatcaccaacacctagaacagtgtatttcctgaatgaattctgagtgaaggaggataagcttaaaggcaggcaggggtgctatactaatcccagagggccaaacggagaggcagatgttctcttttcagagacacgagagccagggaaagactgaattggatcttgctcatttattcgataaataatactgactgccacaccagtccccaggagagctgctccatgcaggaaaaactaac

SEQ ID NO: 5388 - DNA, 62 bp, Homo sapiens
  misc_feature 1..62: note = U/M: U (0.33:0.84) in Adipocytes
  misc_feature 1..62: note = source = chr17:80024096-80024157; Gene: DUS1L (promoter-TSS)
  source 1..62: mol_type = genomic DNA
cggaaaatcaccctccagggaccttccttgcccgccctgggtttccgcagccgccagccttc

SEQ ID NO: 5389 - DNA, 154 bp, Homo sapiens
  misc_feature 1..154: note = U/M: U (0.32:0.83) in Adipocytes
  misc_feature 1..154: note = source = chr18:71452236-71452389; Gene: FBXO15 (Intergenic)
  source 1..154: mol_type = genomic DNA
cggcggggacggggggaggtgctacatgcttttaaacactcgtatctcaagggaacatttaccgcaagaacagcaagcaccagggatggttgctaaaccatctgaaactgccgcctgatccaaccacctcccagcaggccccactcccagcacc

SEQ ID NO: 5390 - DNA, 241 bp, Homo sapiens
  misc_feature 1..241: note = U/M: U (0.22:0.88) in Adipocytes
  misc_feature 1..241: note = source = chr2:127878592-127878832; Gene: BIN1 (Intergenic)
  source 1..241: mol_type = genomic DNA
cgccctctccccacccctggggattggtcctgggtctagggtctctcctgggaacctagaaacatccaagtttccttcacttcctctctgattcttaaagatcctgccctcaggatgctgttctggtcaggcaggaggaaaccttcctctgggataactcatccggcattgtccccagtctgctggtttataaaccgggccgggcttttagaagtcaaaagccaagattttgacccattcg

SEQ ID NO: 5391 - DNA, 65 bp, Homo sapiens
  misc_feature 1..65: note = U/M: U (0.18:0.81) in Adipocytes
  misc_feature 1..65: note = source = chr17:51183100-51183164; Gene: C17orf112 (Intergenic)
  source 1..65: mol_type = genomic DNA
cgctaccataatcatcgctattcccaccggcgtcaaagtatttagctgactcgctacactccacg

SEQ ID NO: 5392 - DNA, 155 bp, Homo sapiens
  misc_feature 1..155: note = U/M: U (0.25:0.86) in Adipocytes
  misc_feature 1..155: note = source = chr3:179388211-179388365; Gene: USP13 (intron)
  source 1..155: mol_type = genomic DNA
cggcctcactctcacggcttcttttccattctccacattgagcatccccttttgtaaacatgagtgggagccaactagagtacagtgttcccgattagtttcatttttcccagttgtaatcacagtctcatttgcctccctgaggttacacgccg

SEQ ID NO: 5393 - DNA, 227 bp, Homo sapiens
  misc_feature 1..227: note = U/M: U (0.21:0.82) in Adipocytes
  misc_feature 1..227: note = source = chr11:10530619-10530845; Gene: MTRNR2L8 (promoter-TSS)
  source 1..227: mol_type = genomic DNA
cggtactatatctattgcgccgatttacaatttctatcgcctatactttatttgggtaaatgatttggttaaagctgttcggtagtaaggtggaatgggtttggggctaggtttggctcagagcggtcaagttgagttgaaatctcctaagtgtaagttgggtgctttgtgttaagctacactctggttcgtccaagtgcactttccagtacacttaccatgttacg

SEQ ID NO: 5394 - DNA, 271 bp, Homo sapiens
  misc_feature 1..271: note = U/M: U (0.19:0.8) in Adipocytes
  misc_feature 1..271: note = source = chr5:134259017-134259287; Gene: PCBD2 (intron)
  source 1..271: mol_type = genomic DNA
cgtcattagggtgagaagaaagagaaataagccgaggatgtctttgattgtgtagtaggggtggaaggtgattttgtcggaatgggaggtgattcctagggggttgtttgatcctgtttcgtgtaggaatagaaggtggagcgctgctagggctgtgataatgaagggcaagataaagtgaaaggtaaagaaccgtgtgagggtgggactatctactgagtagcctcctcagattcattggaccagatctgttccgatgtatgggacggcg

SEQ ID NO: 5395 - DNA, 295 bp, Homo sapiens
  misc_feature 1..295: note = U/M: U (0.27:0.88) in Adipocytes
  misc_feature 1..295: note = source = chr17:41004636-41004930; Gene: AOC3 (exon)
  source 1..295: mol_type = genomic DNA
cgtgatgccttttgtgtgtttgaacagaaccagggcctccccctgcggcgacaccactcagatctctactcgcactactttgggggtcttgcggaaacggtgctggtcgtcagatctatgtccaccttgctcaactatgactatgtgtgggatacggtcttccaccccagtggggccatagaaatacgattctatgccacgggctacatcagctcggcattcctctttggtgctactgggaagtacgggaaccaagtgtcagagcacaccctgggcacggtccacacccacagcg

SEQ ID NO: 5396 - DNA, 149 bp, Homo sapiens
  misc_feature 1..149: note = U/M: U (0.2:0.8) in Adipocytes
  misc_feature 1..149: note = source = chr5:79946939-79947087; Gene: MTRNR2L2 (promoter-TSS)
  source 1..149: mol_type = genomic DNA
cgtccaagtgcactttccagtacacttaccatgttacgacttatctcctctatataaatgcgcaggggttttagttaaatgtcctttgaagtatacttgaggagggtgacgggcggtgtgtacgcgcttcagggccctgttcaactacg

SEQ ID NO: 5397 - DNA, 159 bp, Homo sapiens
  misc_feature 1..159: note = U/M: U (0.31:0.91) in Adipocytes
  misc_feature 1..159: note = source = chr17:1378763-1378921; Gene: MYO1C (intron)
  source 1..159: mol_type = genomic DNA
cggaccatggaggctcagagaggtagatggccttggccagggccacacagtgccaggaccgggacctgggcctcctgacggccagggtacgctgcagggagggaaactctcgttgcttcggccgctgcgggctctgctcagaaggggtggtgagctgcg

SEQ ID NO: 5398 - DNA, 201 bp, Homo sapiens
  misc_feature 1..201: note = U/M: U (0.24:0.83) in Adipocytes
  misc_feature 1..201: note = source = chr12:109595409-109595609; Gene: ACACB (intron)
  source 1..201: mol_type = genomic DNA
cgctggtcttgagtactgccctgggtcagcacaaacattgatgaaaactaataagtaaagacagagttcggttatgaaagagccctctggagttgggaggcatttgggatcttgtgctgaaggctcgggccatctaagaagccagaactcctgagaaggtgaggtcgcaaatgatgactgatttttcatggcatgagaacg

SEQ ID NO: 5399 - DNA, 68 bp, Homo sapiens
  misc_feature 1..68: note = U/M: U (0.18:0.76) in Adipocytes
  misc_feature 1..68: note = source = chr17:51183274-51183341; Gene: C17orf112 (Intergenic)
  source 1..68: mol_type = genomic DNA
cgtactacacgacacatactacgtcgtagcccacttccactacgtcctatcaataggagctgtattcg

SEQ ID NO: 5400 - DNA, 204 bp, Homo sapiens
  misc_feature 1..204: note = U/M: U (0.27:0.85) in Adipocytes
  misc_feature 1..204: note = source = chr17:41004345-41004548; Gene: AOC3 (exon)
  source 1..204: mol_type = genomic DNA
cgagtggcctcctcactgtggactttctcctttggcctcggagcattcagtggcccaaggatctttgacgttcgcttccaaggagaaagactagtttatgagataagcctccaagaggccttggccatctatggtggaaattccccagcagcaatgacgacccgctatgtggatggaggctttggcatgggcaagtacaccacg

SEQ ID NO: 5401 - DNA, 206 bp, Homo sapiens
  misc_feature 1..206: note = U/M: U (0.28:0.86) in Adipocytes
  misc_feature 1..206: note = source = chr12:115682865-115683070; Gene: TBX3 (Intergenic)
  source 1..206: mol_type = genomic DNA
cggggaagaactgggggagaagttactgtttgtcttcctatgtgaggatgctggttggatggtctaatgggacctagaagcaagaggaagcagctctcttggcaagaccgactcttctctgtagtttccctgggtctgtgctcccggccgtgcaggctgccagaaccattcaacatccagggtggataatgggaatcccataagcg

SEQ ID NO: 5402 - DNA, 49 bp, Homo sapiens
  misc_feature 1..49: note = U/M: U (0.29:0.86) in Adipocytes
  misc_feature 1..49: note = source = chr9:133811283-133811331; Gene: FIBCD1 (intron)
  source 1..49: mol_type = genomic DNA
cggcgtcagcgttatgctcccagaggaaaatccccgttaaagaacctcg

SEQ ID NO: 5403 - DNA, 166 bp, Homo sapiens
  misc_feature 1..166: note = U/M: U (0.25:0.82) in Adipocytes
  misc_feature 1..166: note = source = chr9:130660439-130660604; Gene: ST6GALNAC6 (intron)
  source 1..166: mol_type = genomic DNA
cgaggtgggcagatcactaggtgaagagatccagaccagcctggccaatatggtgaaaccccgtctctactaaaaatacaaaaattagctgggcgtggtggcgtgcgcctgttgtcccagctactccggaggctgaggcaggagaatcgcttgaacccgggaggcg

SEQ ID NO: 5404 - DNA, 216 bp, Homo sapiens
  misc_feature 1..216: note = U/M: U (0.28:0.85) in Adipocytes
  misc_feature 1..216: note = source = chr13:107115260-107115475; Gene: EFNB2 (Intergenic)
  source 1..216: mol_type = genomic DNA
cgatttcttggtatgagtcccagaatcttcctgaccatgtgcttggtgaggggcgggcataaagggattgaaataatttcctcccttgggccatggataaatatatctgacaactctggatgtatttcccttcagtccctaagagtagctttgaattttggggtaaactctgtgcaatgtgaggatgaaatccgggtgactctgggtgacgaaacg

SEQ ID NO: 5405 - DNA, 350 bp, Homo sapiens
  misc_feature 1..350: note = U/M: U (0.28:0.85) in Adipocytes
  misc_feature 1..350: note = source = chr10:71891102-71891451; Gene: AIFM2 (intron)
  source 1..350: mol_type = genomic DNA
cgggacacagcaggatggagacggttgggcggcctcccttcctgggacactccatggccagcccctcagggactacttgaagaacagaacccccaaaagaccagtttctgaaaagggactcaaagtctaagggaggcagcctccttttatccccaggggagggcagctctggggcagacaggttcatctggatgtcatattcactcccgcacagaaaacctaggccaagcaatttgtccatcctcctcagagccagttttgtggtccccatggtctgcccaccacctgtacctggacgctggcttcatttggccaccagacaaaagtcaggctggccctggagtccaccg

SEQ ID NO: 5406 - DNA, 429 bp, Homo sapiens
  misc_feature 1..429: note = U/M: U (0.23:0.8) in Adipocytes
  misc_feature 1..429: note = source = chr11:10530073-10530501; Gene: MIR4485 (promoter-TSS)
  source 1..429: mol_type = genomic DNA
cggaggagaatgttttcatgttacttatactaacattagctcttctatagggtaatagattggtccaattgggtgcaaggagttcagttatgtgtttgggattttttagatgacaggtgtcgagcttgaacgctttcttaattggtggctgcttttaggcctactgtgggtattaaattttttactctctttacaaggttttttcctagtgtccaaagagctgttcctctttggactaacagttaaatttacagggggatttggagggttctgtgggtaaatttaaagttgaactaagattctgtcttggacaaccagctatcaccagactcggtaggtttgtcgcctctacctacgaatcttcccactattttgctacatagacgggtgtgctcttttagctgttcttaggtagctcgtctggtttcg

SEQ ID NO: 5407 - DNA, 187 bp, Homo sapiens
  misc_feature 1..187: note = U/M: U (0.28:0.84) in Adipocytes
  misc_feature 1..187: note = source = chr19:48219990-48220176; Gene: EHD2 (exon)
  source 1..187: mol_type = genomic DNA
cgctttggggccttccactcgccggccctggaggacgcagacttcgacggcaagcccatggtgctggtggccggccagtacagcacgggcaagaccagcttcatccagtacctgctggagcaggaggtgcccggctcccgcgtggggcctgagcccaccaccgactgctttgtggccgtcatgcacg

SEQ ID NO: 5408 - DNA, 220 bp, Homo sapiens
  misc_feature 1..220: note = U/M: U (0.31:0.87) in Adipocytes
  misc_feature 1..220: note = source = chr13:110896068-110896287; Gene: COL4A1 (intron)
  source 1..220: mol_type = genomic DNA
cgcttaccaggtgccacgcacagtcagcgatcatcttatttaatgatcataacaagcatttcaagataggtagtgccatccccatttacagatgtggaaactgaattagaagatttattataacacgctaggacaaagttgaaattagaacccaacttcaatttccattatgtaaaattgtcatcacatgaaaagatagaaatacgtcggtacatacacg

SEQ ID NO: 5409 - DNA, 280 bp, Homo sapiens
  misc_feature 1..280: note = U/M: U (0.28:0.84) in Adipocytes
  misc_feature 1..280: note = source = chr12:117088493-117088772; Gene: C12orf49 (Intergenic)
  source 1..280: mol_type = genomic DNA
cggtagcttcccctctaactggctgcttccatggtttggaagtcccaggaggaagtacatcttgttcgggagagcttgggggtaattgcctgaatcctttccccagtacttccttccacataatgtttttaaatttcctccagatgactgccacccctggtgatatggtttggctgtgtccccacccaaatctcatcttgaattgtagctccgacaattcccacatgtcgtgggagggacccagtgggaggtaattgaatcataggggcaggtctttccg

SEQ ID NO: 5410 - DNA, 316 bp, Homo sapiens
  misc_feature 1..316: note = U/M: U (0.32:0.88) in Adipocytes
  misc_feature 1..316: note = source = chr2:10955156-10955471; Gene: PDIA6 (Intergenic)
  source 1..316: mol_type = genomic DNA
cgcagctgcacgaggcacacacccctgtgaagcccactgtacaggcacaggcttcgggaaatgcacaggcttctggaaatgcacaggcttctggaaatgcacaggcttctggaaatgcacaggcctccggaaatgcacaggcttctggaaatgcacagccttctggaaatgcacaggcttccggaaatgcaccagggcgtgttgctcatttcttttttcattaaaaccaaatgcacattaacaacctaattatacgagcaactgtctcaggcacagtcactggccccagggagcacacagccaacagagaggcacg

SEQ ID NO: 5411 - DNA, 376 bp, Homo sapiens
  misc_feature 1..376: note = U/M: U (0.24:0.8) in Adipocytes
  misc_feature 1..376: note = source = chr17:40577387-40577762; Gene: PTRF (Intergenic)
  source 1..376: mol_type = genomic DNA
cgccagctccctttcccacagaaaagcggcaacccttttccctccttaggaaaccacacttgggtttccccagctggctggatgatggtcctggcaaaaggtcacttctagtctggtatccattatcattaggaagagtgaaaaactggtctatggggacccagggcctcctcaacccagacagagaacccacaaactcagaaaggagaccgacagtgcagggactgggttagtgccctaacaacattgtagggttttttaagggtttacaacaccatatttgttatccgaaattctcatagaaaatggagccatcaactagggctgtttatcaggttatcctgaagtactgtttctgctagaaaggcaagatacg

SEQ ID NO: 5412 - DNA, 400 bp, Homo sapiens
  misc_feature 1..400: note = U/M: U (0.33:0.89) in Adipocytes
  misc_feature 1..400: note = source = chr21:35171461-35171860; Gene: ITSN1 (intron)
  source 1..400: mol_type = genomic DNA
cgctcatgtgcatttttaaacattttatttcatgtaaaatctaaattattttcatctaggtttcatccttaggctaattatttcccaaagaaatgtagaggaagagtgtcttcatcggggattatcagtataaccaaaatcagcacttagtttttatatgaccaggttaaagagcctaaaacatctgcattttcatgtttcagtatggaaactggtgcctctgttccctcccaaacaagttgactccttggctgattcagactttgggtcatatcctaactgctacattgtactcaacacactgggtagggaggagggcgggtattgatgctttacagatctgcactgctggagcccaaggaaagaggcagagacaagggacctttaggcagcctcgccg

SEQ ID NO: 5413 - DNA, 128 bp, Homo sapiens
  misc_feature 1..128: note = U/M: U (0.34:0.89) in Adipocytes
  misc_feature 1..128: note = source = chr8:23244277-23244404; Gene: LOXL2 (intron)
  source 1..128: mol_type = genomic DNA
cgctgaatgcaagcagagagcatctgccaactgggtcagcagaacatgggagaatcaggccaaggatctccgtagctccctccacacgctccaaataaatgcggctttcacaggcacgcaagggtccg

SEQ ID NO: 5414 - DNA, 140 bp, Homo sapiens
  misc_feature 1..140: note = U/M: U (0.21:0.76) in Adipocytes
  misc_feature 1..140: note = source = chr5:99384926-99385065; Gene: LOC100133050 (Intergenic)
  source 1..140: mol_type = genomic DNA
cgaagagttctcctagtaggttaatggtggggggcaaagcgaggttggcgaggcttgccagaagtcatcaaaaggctattagtgggagtagggtttgaagtccttgagagagaattatgatgcggctgtgggttcgctcg

SEQ ID NO: 5415 - DNA, 332 bp, Homo sapiens
  misc_feature 1..332: note = U/M: U (0.28:0.83) in Adipocytes
  misc_feature 1..332: note = source = chr5:134262993-134263324; Gene: MIR4461 (promoter-TSS)
  source 1..332: mol_type = genomic DNA
cgtattataccatagccgcctaattttaagagtactgcagcaagtactattgacccagcgatgggggcttcgacatgggctttagggagccataggtggagaccgtaaagaggtatttttactataaaagctattgtgtacgctagccatattaagttattggctcaggagtttgatagttcttgggcagtaagagtgagtaatagaatattcagtgagcctagggtgttgtgggtgtagattagtgcgatgagtagggggagggagcctactagggtgtagaataggaagtatgtacctgcgttcaggcgttctggttggttgcctcatcg

SEQ ID NO: 5416 - DNA, 336 bp, Homo sapiens
  misc_feature 1..336: note = U/M: U (0.31:0.86) in Adipocytes
  misc_feature 1..336: note = source = chr9:129882759-129883094; Gene: ANGPTL2 (intron)
  source 1..336: mol_type = genomic DNA
cgtgggattttctgaaaaccctagcaggatatgtccagaacagggaaagaatttgggtctctggccgggtgcagtggctcacgcctgcaatcccagcacttcgggaggccgaggtgggcggatcacgaggtcaggagatcgagaccatcctggctaacgtggtgaaacccgtctctactgaaaatacacacacacaaaattagctgggcgtggtggtgggcacctgtagccccagctactcgggaggctgaggcaggagaatggcgtgaacccagcaggcggagtttgcagtgagccgagatcatgccactgcactccagcctgggtgacagagcg

SEQ ID NO: 5417 - DNA, 498 bp, Homo sapiens
  misc_feature 1..498: note = U/M: U (0.33:0.87) in Adipocytes
  misc_feature 1..498: note = source = chr2:242517608-242518105; Gene: BOK-AS1 (Intergenic)
  source 1..498: mol_type = genomic DNA
cgtctctcatgagaccctcacataatgcccggcaccacttgagactgcagagtcttgaccagcaagaaggtcctcaccagatgcaactcctataccttggactccctgcctccagaactgtaagaaataaaattcttttctttataacttacccactctgtggtattcagtcatagcaacagaaaatgaattaagacagaaagaaagaccatgttcctggataagaaaactctcctaagcaagacaattctacaaaagtaaatttataaatgtaatgtaatccttataaaaacgccgcatgcttttccccagatctagaaaactaattataaagttcatgtgagagaggaagtgcacaggagtgtaaaaatagccaggaaaactctgcaaaagaaatggagaggtcctctgcccccgaaccatctcctggcctccgtaatggaaccacatgacaccaggacccatgtaggcaagcaggcccagggacatgaaaacccg

SEQ ID NO: 5418 - DNA, 53 bp, Homo sapiens
  misc_feature 1..53: note = U/M: U (0.36:0.89) in Adipocytes
  misc_feature 1..53: note = source = chr12:1903818-1903870; Gene: CACNA2D4 (intron)
  source 1..53: mol_type = genomic DNA
cgcaggtcaggcggctgagtggaagagacacgtaggccaaggcacggggtacg

SEQ ID NO: 5419 - DNA, 75 bp, Homo sapiens
  misc_feature 1..75: note = U/M: U (0.35:0.88) in Adipocytes
  misc_feature 1..75: note = source = chr8:10576848-10576922; Gene: SOX7 (Intergenic)
  source 1..75: mol_type = genomic DNA
cgatttgctattggaagccgtcaggaagcacaggagaaggcagaggtgccaggacaagtgacgcaacggagcccg

SEQ ID NO: 5420 - DNA, 99 bp, Homo sapiens
  misc_feature 1..99: note = U/M: U (0.27:0.8) in Adipocytes
  misc_feature 1..99: note = source = chr17:62011700-62011798; Gene: CD79B (Intergenic)
  source 1..99: mol_type = genomic DNA
cgtggacaaggatgcagatgtggcctttgggcttcattcccattcatgccgggcagggatctgttttcaggaggggcggaggcagcgggggccccaccg

SEQ ID NO: 5421 - DNA, 111 bp, Homo sapiens
  misc_feature 1..111: note = U/M: U (0.32:0.85) in Adipocytes
  misc_feature 1..111: note = source = chr11:18994018-18994128; Gene: MRGPRX1 (Intergenic)
  source 1..111: mol_type = genomic DNA
cgctgaggaagaggaagtctgccgcagccaggttgaggatgtagatggagacggcgttcctgcgcatgcggaagcccaggagccagagcacaaccgcgtttcctgtcagcg

SEQ ID NO: 5422 - DNA, 120 bp, Homo sapiens
  misc_feature 1..120: note = U/M: U (0.25:0.78) in Adipocytes
  misc_feature 1..120: note = source = chr5:99386958-99387077; Gene: LOC100133050 (Intergenic)
  source 1..120: mol_type = genomic DNA
cggatgaggcaaatagtgaggaaagttgatccaatgatgacgtggagtccgtgaaagcctgtggctacaaaaaatgttgagccatagatgccgtcgtcagagatggtaaagggcgtttcg

SEQ ID NO: 5423 - DNA, 127 bp, Homo sapiens
  misc_feature 1..127: note = U/M: U (0.3:0.83) in Adipocytes
  misc_feature 1..127: note = source = chr7:1096422-1096548; Gene: GPR146 (promoter-TSS)
  source 1..127: mol_type = genomic DNA
cggggccaaatgacatggtggacatcaggcttcccgagatagctgtaggtccctgaggaatgcctgtgctttggcggggtgggggggtgggggtggcgaaattcttactctaggatggctccagccg

SEQ ID NO: 5424 - DNA, 351 bp, Homo sapiens
  misc_feature 1..351: note = U/M: U (0.34:0.87) in Adipocytes
  misc_feature 1..351: note = source = chr4:144203887-144204237; Gene: GAB1 (Intergenic)
  source 1..351: mol_type = genomic DNA
cggcttcaagccaagaggacataaaccaacatcaacgaaaggcattctagccttagaattagtatagacttggccgggcgcggtggctcacgcctgtaatcccagcactttgggaggccgagacaggcggatcatgaggtcaggagatcgagaccaccctggctaacacagtgaaaccctgtctctactaaaaaaatacaaaaaaattagccgggcttggtggcaggcgcctgtagtcccagctacttgggaggctgaggcaggagaatggcatgaacccaggaggcggagcttgcagtgagctgagatcgcgccactgtgctccagcctgggtgacacagcataactccg

SEQ ID NO: 5425 - DNA, 425 bp, Homo sapiens
  misc_feature 1..425: note = U/M: U (0.23:0.76) in Adipocytes
  misc_feature 1..425: note = source = chr5:99386389-99386813; Gene: LOC100133050 (Intergenic)
  source 1..425: mol_type = genomic DNA
cgaaatcattcgttttatttaaactatgtaccaattcggctcagtctaatcccttttgtgatcattcgtaggctaggcttagggttaggataatgattaataagagggatgatatgactgttagtggtaagttggttgtttgtagggctcatggtaagggcagtaggagagcaatttctaggtcaaataatagaaaggtgatggctactaagaagaatttcatggagaaaggaatgcgggtggggaatagggggtcgaagccacattcgtaagggttggatttttctatgtaactgttgagttgtggtaatcagaatgtaataactattaatagtagggctaggagggtattgactattagaattagggcgaagtttattactcttttttgaatatcatcaaaactagttaattggaagttaacg

SEQ ID NO: 5426 - DNA, 243 bp, Homo sapiens
  misc_feature 1..243: note = U/M: U (0.25:0.77) in Adipocytes
  misc_feature 1..243: note = source = chr5:93905847-93906089; Gene: KIAA0825 (intron)
  source 1..243: mol_type = genomic DNA
cgaaataggatcaaacaatcccttaggcatcccctcccattccgacaaaattaccttccatccttactacacaaccaaagacatcctaggcctattccttttcctcctcaccctattaacactagtactattctcaccagacctcctgggcgacccagacaactacaccctgactaaccccctaaacaccccaccccacatcaaacccgaatgatatttcctattcgcctacgcaattctccg

SEQ ID NO: 5427 - DNA, 256 bp, Homo sapiens
  misc_feature 1..256: note = U/M: U (0.35:0.87) in Adipocytes
  misc_feature 1..256: note = source = chr6:151857256-151857511; Gene: CCDC170 (intron)
  source 1..256: mol_type = genomic DNA
cgaactttctcctgcttccctttgaactttgagaatgagaaccaaatggtctgaacataacacttctctgcgtagcatgtttgacatatttggaatacaaagaatgcttctgcctttaatctggctttgtgcagctgcacggaaaagatcgtttaacactcttctttatattttgtattttgggggaattctaccaggaaacttacgatcatctttcggaagtcccggtcacgcgggagcagttaaaccactatcg

SEQ ID NO: 5428 - DNA, 272 bp, Homo sapiens
  misc_feature 1..272: note = U/M: U (0.33:0.85) in Adipocytes
  misc_feature 1..272: note = source = chr2:44463142-44463413; Gene: SLC3A1 (Intergenic)
  source 1..272: mol_type = genomic DNA
cgttagtttattaacctgagtagaatttaccaccaagagtcataatttcttaatgctaaaagtagaaatccactgggagttgcattgtcattgaaaaaaaattataatgaaggccaggcgcagtggctcacgcctgtaatcccagcactttggcaggccaaggcgggcagatcacttgaggtcaacagtttgagaccagcctggctaaaatggtgaaacctgtctctacttaaaaaataaaaataaaaaaattaacttggtgtggtgctgcg

SEQ ID NO: 5429 - DNA, 317 bp, Homo sapiens
  misc_feature 1..317: note = U/M: U (0.35:0.87) in Adipocytes
  misc_feature 1..317: note = source = chr12:125114610-125114926; Gene: NCOR2 (Intergenic)
  source 1..317: mol_type = genomic DNA
cgcgccacgttgtactttgtgtcatattgtcacatctcaggatactatttctaaccagtgcccttttatcccaggaattatttgccccttccctgtgccttctgccaaactagactgtgtgccatccaatgcccaggggaggaaaagtaggagagaaaagcgtaacaaatgttactcagtttcagaagccagtgctttcagattccaagaatctgggcttttgagctgcaaaacctcagccaggaagagttccagatatcaattttatggcaaaaacaatagatttgggggtggggggaaggatcttacgtataacg

SEQ ID NO: 5430 - DNA, 99 bp, Homo sapiens
  misc_feature 1..99: note = U/M: U (0.3:0.81) in Adipocytes
  misc_feature 1..99: note = source = chr20:60782586-60782684; Gene: HRH3 (Intergenic)
  source 1..99: mol_type = genomic DNA
cgctgccgaggatcctggatctggggacatctctagcagcaccgccaggaagaggccgtacagaggacgcacggcaggcccaaccctgcctgctgttcg

SEQ ID NO: 5431 - DNA, 242 bp, Homo sapiens
  misc_feature 1..242: note = U/M: U (0.34:0.85) in Adipocytes
  misc_feature 1..242: note = source = chr2:109942715-109942956; Gene: SH3RF3 (intron)
  source 1..242: mol_type = genomic DNA
cgctcatttgtttttttatgtagtgtacagtttttcatggatctgagtatatcatagactatctacttcacagttaatgggtatttcagttgttgttgttctttttttttaatgttcatgtagaagtacatccttaccctggagaatactatgttctttggaacaggatggcttggcgatcaggcagcactttgcactcctaccagcagtggtgagagacgtttccttctgcgcccttgccg

SEQ ID NO: 5432 - DNA, 298 bp, Homo sapiens
  misc_feature 1..298: note = U/M: U (0.32:0.83) in Adipocytes
  misc_feature 1..298: note = source = chr12:94389336-94389633; Gene: PLXNC1 (Intergenic)
  source 1..298: mol_type = genomic DNA
cgcaccactgcacttcctcctgggtgacagagcgaaaaaaaaagcacacatgcaaatttcagaataatgggatcaaaatgccttccaaaaatttcggaagctttttctctgacaatactgaacaaggccaagtccaagtggtatgaagcaactctcaataagatgcctggcacaggaccagccgttgcttccttcctaatgtctatactcatcaagccacatgaacttgtggcttgatacttgaataactatttttaaattatttttgacctgcaggtaaaacaataactggaaatcg

SEQ ID NO: 5433 - DNA, 303 bp, Homo sapiens
  misc_feature 1..303: note = U/M: U (0.33:0.84) in Adipocytes
  misc_feature 1..303: note = source = chr2:1718267-1718569; Gene: PXDN (intron)
  source 1..303: mol_type = genomic DNA
cgggtccacgctcagggaaatgcccctcccacagcaggcccagtgcgtgcattccctgaaaggccaggtggggacatctttgcttgaggtgcagatcctggccttgcagctcctgaattctgtctctgcagcaggaatgcggccacagaagaggcgacccggtggctgtggccaagctccgataagcttttatttatggtgctgaaattccaatttcataaaatgtccacagcatgaaatatttactcttcttttgatttttttcagacatttagaaatgcaaagtgcatagctcttgggccg

SEQ ID NO: 5434 - DNA, 479 bp, Homo sapiens
  misc_feature 1..479: note = U/M: U (0.34:0.85) in Adipocytes
  misc_feature 1..479: note = source = chr10:4674820-4675298; Gene: LINC00705 (Intergenic)
  source 1..479: mol_type = genomic DNA
cggctgcaaacacctcagtgaaatcaagaacaagccaggaggcatgcaatcatctttagggtttaatatgcttctgtggaaatcctaactagaaaaattagaaaaaggaaataaaatgaaatataaaatactgaattgggaaaatatacacaaccctacaggcaactttcattttttgatgatgtgagggccaagagccttggccttggttcactgaaaaactgagacagctgagtataaaggggtccccagagaacctccgaccagcctgcgcatggggagaacgggatggagcctcagaaagtttgtgccattgttttgcagtggggaggagcctggcctctcctgttctggggtggagtctcgctttgctgagagtccttgtttcccttttgttcccttttcacccagtaagccctgcccttctcacccttcagagtgtctgtgagcctgatctcttatggttgtataagaacccg

SEQ ID NO: 5435 - DNA, 157 bp, Homo sapiens
  misc_feature 1..157: note = U/M: U (0.35:0.85) in Adipocytes
  misc_feature 1..157: note = source = chr12:2037717-2037873; Gene: LOC100271702 (TTS)
  source 1..157: mol_type = genomic DNA
cgtttcgtgactgtggctggccttcactggtgaactcttgctcccttggcccaccgccctcaggggccagccccatggctcgccttagttgggctgatgttcccgtgctgaaatccttgggcacgcctcggaggatagaggaggactccggaccccg

SEQ ID NO: 5436 - DNA, 253 bp, Homo sapiens
  misc_feature 1..253: note = U/M: U (0.35:0.85) in Adipocytes
  misc_feature 1..253: note = source = chr14:95948245-95948497; Gene: SYNE3 (Intergenic)
  source 1..253: mol_type = genomic DNA
cgcctgctgggtcagcacgtggattgccaactgaggctgagggccctgtgtcctggggtcgctgggtccagacctctctccctcccttccccttccccggctctccaaagctcagggtgctgggtggggcccctacttggctttgcaatgccactggtgaggggctgatgccccataaggaccaggttcttacctctgtctcaatccctccaacaccctaacagcagtttttaaaattctctggggccaggcg

SEQ ID NO: 5437 - DNA, 326 bp, Homo sapiens
  misc_feature 1..326: note = U/M: U (0.37:0.87) in Adipocytes
  misc_feature 1..326: note = source = chr8:99009173-99009498; Gene: MATN2 (intron)
  source 1..326: mol_type = genomic DNA
cgaaattaaactgggggaaaaaagatcaaggcagaatcctactgaagaaaagattcttggccaggatttgttcttgctcctcatctgggcacaatttctcctcatggagagtgctatcatcagtttaaggcatgaattattaaggcagtagtgcaaagcacagaaactgcgactgccttgcctgcccaggtagagccctagggccaaatcagatgtgggttcatcccctgtgctgggctccaggatccctgattctggtaccatgatgagtgctctcaaaaattggtgtgaagcccacgggttcgactgagccaagagacgtgacg

SEQ ID NO: 5438 - DNA, 95 bp, Homo sapiens
  misc_feature 1..95: note = U/M: U (0.37:0.86) in Adipocytes
  misc_feature 1..95: note = source = chr16:48565470-48565564; Gene: N4BP1 (Intergenic)
  source 1..95: mol_type = genomic DNA
cgcctctcccaaatctcacagtgctctcctagtcctccatgggttcacagccgccccatccagcagccgggtggggactctcacgtatgttcgcg

SEQ ID NO: 5439 - DNA, 446 bp, Homo sapiens
  misc_feature 1..446: note = U/M: U (0.36:0.85) in Adipocytes
  misc_feature 1..446: note = source = chr1:96991151-96991596; Gene: PTBP2 (Intergenic)
  source 1..446: mol_type = genomic DNA
cgataattagataggataatctgttgagatattaatttgtgatttgtatttctgatttgtgctatagaagacttgaaggattagaagggactttcctcctacttccttcactggaaagacaaccaggcctttatcttctaagatcttttttctattttcaagcaattaacagtttatttttgtatcagaacatcctgtcccatccctcaagatctgttgcgcaaaatgtaggcccatcgggaggaagaaagttgaggagaggggtgatttgccttgctggcaacttattgacatgtctttgccatgctcctactcaggaaattagatcccatgacctataaaattcagtcaaaactgcagctaaactcacaccctctgctatattggacctgaagtctctgcagccattctcctctattgccacattcatcccccgtaccaagtcg

SEQ ID NO: 5440 - DNA, 71 bp, Homo sapiens
  misc_feature 1..71: note = U/M: U (0.35:0.83) in Adipocytes
  misc_feature 1..71: note = source = chr4:8188123-8188193; Gene: SH3TC1 (Intergenic)
  source 1..71: mol_type = genomic DNA
cgtggtgtcccccatgggcttctgcgtggagcagaagacggatgttaggggaaactaaggaagtcgagtcg

SEQ ID NO: 5441 - DNA, 217 bp, Homo sapiens
  misc_feature 1..217: note = U/M: U (0.36:0.84) in Adipocytes
  misc_feature 1..217: note = source = chr5:178296635-178296851; Gene: ZNF354B (intron)
  source 1..217: mol_type = genomic DNA
cgagtgcagagttgtccagagggatgccgggcacctgatagtgttgtcagtcagtcccttttcagattggggaggatggccctgcgggaaaaccctgagcagttgattgagtaagaaaggacgtcagagctgtttcctgcccgattgctcttggtgggatgaccttcgtcctccttttgtcagatggaagtcagatggcattcctagggtgctgacg

SEQ ID NO: 5442 - DNA, 304 bp, Homo sapiens; identical to SEQ ID NO: 4644
  misc_feature 1..304: note = U/M: U (0.36:0.83) in Adipocytes
  misc_feature 1..304: note = source = chr8:62322984-62323287; Gene: CLVS1 (intron)
  source 1..304: mol_type = genomic DNA

SEQ ID NO: 5443 - DNA, 240 bp, Homo sapiens
  misc_feature 1..240: note = U/M: U (0.36:0.82) in Adipocytes
  misc_feature 1..240: note = source = chr20:59920155-59920394; Gene: CDH4 (intron)
  source 1..240: mol_type = genomic DNA
cgatggacgatcaaattctaccaagagtcaacacatgctcctaatgagaaacctaatgggttccatgtgtgcatttcgggccaggcccagtgcgcctccctcactgctggcatgtttgcagttaccttcatctgtaaaagtcatatttccaccccagggaaatcgagagtgacaacacgccatgttcttctctactttctcacctggaatagttttaaaacctcagacaacaccaccccg

SEQ ID NO: 5444 - DNA, 145 bp, Homo sapiens
  misc_feature 1..145: note = U/M: U (0.36:0.79) in Adipocytes
  misc_feature 1..145: note = source = chr17:41722916-41723060; Gene: MEOX1 (intron)
  source 1..145: mol_type = genomic DNA
cgtcctgctccctgaaagacccatctctgccttgccggcgaggagtgttggaaggagggatcttctgttttcagaggccgggtctaagctacctgggggactgggctggggaattcagaccccctagtgtaaagcagagaagccg

SEQ ID NO: 5445 - DNA, 227 bp, Homo sapiens
  misc_feature 1..227: note = U/M: U (0.39:0.79) in Adipocytes
  misc_feature 1..227: note = source = chr14:90274328-90274554; Gene: EFCAB11 (intron)
  source 1..227: mol_type = genomic DNA
cgagtggggatggaataggttggcaggaaaagaagccgggataattggctatccatctggggatgggtggagtttgactccatggtagagcctgctttgtgttcaacaaaatttacttccctctcttccggggaacacagctagactacatttcccagcctcccttgcaatgagatgcaaccgggagtcctggcaatgaatgttaataatataatgatataggaacg

SEQ ID NO: 5446 - DNA, 331 bp, Homo sapiens
  misc_feature 1..331: note = U/M: U (0.31:0.9) in Adipocytes
  misc_feature 1..331: note = source = chr19:57125150-57125480; Gene: ZNF71 (intron)
  source 1..331: mol_type = genomic DNA
cgatgagcggatgtgggtttcctcttacaggaatcagtgacgttcagggatgtgactgtggacttcacccaggaggagtggcagcagctggagcctgcccagaaggacctgtacagggatgtcatgctggagaactacaggaacctggtctcactgggtaaggggcagcttcgttgagttactcatcattggcccataacttcaggaccacaaataaattaaaaaaaaaaaaagatcaacagatctgactacatggaaagttttaaaatttgctctacttgaagctaaaaataaagttgatcacgatggtatgggaaataatatttctcac

SEQ ID NO: 5447 - DNA, 162 bp, Homo sapiens
  misc_feature 1..162: note = U/M: U (0.35:0.83) in Adipocytes
  misc_feature 1..162: note = source = chr9:111944902-111945063; Gene: EPB41L4B (intron)
  source 1..162: mol_type = genomic DNA
cggtgatcaaaagaagcggttgaccttgctgtctggcatcccgcagaaaagcacaccgcatgggaacaagggtttaaaatgcacatctgttttctggatctacttacagtaaactgtggccctgtggtgaaagtatcaggaaacgggttcattgtatcaacc

SEQ ID NO: 5448 - DNA, 491 bp, Homo sapiens
  misc_feature 1..491: note = U/M: U (0.36:0.82) in Adipocytes
  misc_feature 1..491: note = source = chr22:38051826-38052316; Gene: SH3BP1 (TTS,exon)
  source 1..491: mol_type = genomic DNA
cggcccccatggccaggagggctcaggacaatcctctatttcctgaccttttcctcgtccaccctgggcttggggacccccccaccggactctccactctccggcaggtcctaggggagccaccggaaggaaggagaggtttgcctgctcctacgggactgattcttctcttgccgacatgttttttgtaaggctggtaaataaattattttggacaaaactggagcagctgcccaaatgatagttttattttctgtccttgaaataaagaagccaattttataaaggggaaaacaatacatattctttgcctcctttcttcctgtctgaagtgagatcacagcagacatttttagagctttctctgcactacatgctgtgctgttctgtggatgatttccacttaatcttctcctactgcaggaaataccattacctcttagcagtgaggagactgaggcccagacagaagtgacctgccaaggtcacac

SEQ ID NO: 5449 - DNA, 292 bp, Homo sapiens
  misc_feature 1..292: note = U/M: U (0.39:0.83) in Adipocytes
  misc_feature 1..292: note = source = chr22:39664962-39665253; Gene: PDGFB (Intergenic)
  source 1..292: mol_type = genomic DNA
cgactcggatcctgagtccaggcttttggccacgcctgcctgacagtccagtgggaaaactgtcaggtcctgggagaccctggcagggggacagactgccccaccgcagccaggggcagctcagagggtccccagggcagcagaggtctaagaccactgtggacatgggcctgagagccagagctcaaaagtcaggttggaggtttcctatttgaggagagcctccctctgcccagaacaccctctcctcctgcctttacctgcttcatgcttactcttgctcagctgagac

SEQ ID NO: 5450 - DNA, 255 bp, Homo sapiens
  misc_feature 1..255: note = U/M: U (0.22:0.8) in Adipocytes
  misc_feature 1..255: note = source = chr11:10529463-10529717; Gene: AMPD3 (TTS)
  source 1..255: mol_type = genomic DNA
cgctgttatccctagggtaacttgttccgttggtcaagttattggatcaattaaacgtggtaattcgctttgactggtgaagtctcggcatgtgttgctcggaggtcggattgtgctccgaggtcgccccaaccgaaatttttcacgcaggtttgatagtttagggcctgtggacttgttaagtgttgtttgcgttaatgaattaaagctccatagggtcttctcgtcttgttatactatgcccgcctcttcacg

SEQ ID NO: 5451 - DNA, 413 bp, Homo sapiens
  misc_feature 1..413: note = U/M: U (0.28:0.83) in Adipocytes
  misc_feature 1..413: note = source = chr5:99389410-99389822; Gene: LOC100133050 (Intergenic)
  source 1..413: mol_type = genomic DNA
cgaacgtatgatagggtggaaggcatccatatagccactccaggttggtggagggttgttcgattattagggcttttcgttttgaagcgaagccttctcaaattataaaaattattagtattactgctgttagggaaataaatgagcctacagatgatagaatatttcatgtggtgtatgcatcggggtagtccgagtaacgttggggtattccagataggccaagaaagtgttgtgggaagaaagttagatttacaccaatgaacatgatagcaaaatgaattttggcataggtttggtctagagtgtaacctgagaacagagggaatcagtggataaaaccccctatgatggcgaatacagctcctattgatagaacgtaatggaagtgagctacgacgtagtatgtatcg

SEQ ID NO: 5452 - DNA, 59 bp, Homo sapiens
  misc_feature 1..59: note = U/M: U (0.36:0.89) in Adipocytes
  misc_feature 1..59: note = source = chr9:134195865-134195923; Gene: PPAPDC3 (Intergenic)
  source 1..59: mol_type = genomic DNA
cgcgcctccccttaggaaagaagaattctgatgctgagccctgggccggcagatgcgcg

SEQ ID NO: 5453 - DNA, 103 bp, Homo sapiens
  misc_feature 1..103: note = U/M: U (0.3:0.82) in Adipocytes
  misc_feature 1..103: note = source = chr9:19129150-19129252; Gene: PLIN2 (Intergenic)
  source 1..103: mol_type = genomic DNA
cggagtctcgctctgtcgccaggctggagtgcagtggcgcgatcttggctcactgcaaccccagcctcccgggttcaagtgattctcttgcctcagcctcccg

SEQ ID NO: 5454 - DNA, 102 bp, Homo sapiens
  misc_feature 1..102: note = U/M: M (0.64:0.14) in Adipocytes
  misc_feature 1..102: note = source = chr17:46693343-46693444; Gene: HOXB8 (Intergenic)
  source 1..102: mol_type = genomic DNA
cgattgcagcacggtgggggtgacgaagccgaaatgagaatgattatggggatttttttttggcacaaacggtgacttttctgagattttcacctccttccg

SEQ ID NO: 5455 - DNA, 53 bp, Homo sapiens
  misc_feature 1..53: note = U/M: M (0.63:0.16) in Adipocytes
  misc_feature 1..53: note = source = chr17:46694698-46694750; Gene: HOXB8 (Intergenic)
  source 1..53: mol_type = genomic DNA
cgcgtggctgaggggaccgtgaggcaacggagggccgagttaaattgttgccg

SEQ ID NO: 5456 - DNA, 63 bp, Homo sapiens
  misc_feature 1..63: note = U/M: M (0.61:0.16) in Adipocytes
  misc_feature 1..63: note = source = chr5:135313253-135313315; Gene: LECT2 (Intergenic)
  source 1..63: mol_type = genomic DNA
cgtcccgttgcaccgccgctctgtggccttccgctagtgggcgccgctgagcggacttcggcg

SEQ ID NO: 5457 - DNA, 152 bp, Homo sapiens
  misc_feature 1..152: note = U/M: M (0.57:0.12) in Adipocytes
  misc_feature 1..152: note = source = chr17:46693078-46693229; Gene: HOXB8 (promoter-TSS)
  source 1..152: mol_type = genomic DNA
cgtattttcaaacaaacgaggtagtcatatttaaagctttaatgatcaatttccttattattgataaaggtttaactatcgtgtggagggaattggctggataaccggccccccaaaaaacggctgtaaactctttaagaaactataaaacg

SEQ ID NO: 5458 - DNA, 375 bp, Homo sapiens; identical to SEQ ID NO: 5199
  misc_feature 1..375: note = U/M: M (0.64:0.19) in Adipocytes
  misc_feature 1..375: note = source = chr8:98789994-98790368; Gene: LAPTM4B (intron)
  source 1..375: mol_type = genomic DNA

SEQ ID NO: 5459 - DNA, 41 bp, Homo sapiens
  misc_feature 1..41: note = U/M: M (0.6:0.2) in Adipocytes
  misc_feature 1..41: note = source = chr17:46692963-46693003; Gene: HOXB8 (promoter-TSS)
  source 1..41: mol_type = genomic DNA
cgcttcggaaaaatgtaaaagaacacggtttaattgcgccg

SEQ ID NO: 5460 - DNA, 357 bp, Homo sapiens
  misc_feature 1..357: note = U/M: M (0.53:0.13) in Adipocytes
  misc_feature 1..357: note = source = chr4:139786227-139786583; Gene: CCRN4L (Intergenic)
  source 1..357: mol_type = genomic DNA
cggaatataagccttgtgattgatagaggcaggaacccaagcactcggtgagggcgatgtgggggtgggggacgcggttggcagcttggctcctctccacaccaaccggattagtgacaacatcacaggagttcagtggctgctctggttctgtttgcattgtttccttctatgctgttaggcagaagcacaaatacaccttgtgagaaaacctaatatcagtgacaggaaggaatgttacttttaaaggactccttgctcagccatgaggctccatgcagagcctccttccagacagccctgatcctcctgggctttttcccaaggggcaaaaagccacattctatagactgcacg

SEQ ID NO: 5461 - DNA, 71 bp, Homo sapiens
  misc_feature 1..71: note = U/M: M (0.53:0.14) in Adipocytes
  misc_feature 1..71: note = source = chr17:46692823-46692893; Gene: HOXB8 (promoter-TSS)
  source 1..71: mol_type = genomic DNA
cgcagaccacccccaaagactgatgtgggggagtcacggaaaaaaacacgcacacacacatacacaacgcg

SEQ ID NO: 5462 - DNA, 313 bp, Homo sapiens
  misc_feature 1..313: note = U/M: M (0.54:0.15) in Adipocytes
  misc_feature 1..313: note = source = chr10:6622900-6623212; Gene: PRKCQ (promoter-TSS)
  source 1..313: mol_type = genomic DNA
cgccgtgcgtgtcattttaggactttttatgccttgcgggtaatactaatgatggtcacagggaggataaacggggtggtttctttttctatactccatgtaactaatttctcattcaggttagaaaattatatgtctggttactaatattcttactgaatggtttccttgcaatgatgacaccaaataattaaaacgtacttgattaagacttttgttgctgtagtgtactaagatcagattaatctgagaagtaaaatagtaattttttgtccttttttcttttcttgttttgagagagacattaaaaacg

SEQ ID NO: 5463 - DNA, 402 bp, Homo sapiens
  misc_feature 1..402: note = U/M: M (0.85:0.56) in Adipocytes
  misc_feature 1..402: note = source = chr9:138944784-138945185; Gene: NACC2 (intron)
  source 1..402: mol_type = genomic DNA
cgtggggccctgaggctgacctctggactgcccagcctcagtttccctgccactggctgtgacccccaggaagagcacattccacccaaaagaaggggcagggtccaggctcgaggccttgaggtgagccccctcctgcttggccagctgcctccaccaccctcggggtaaccctggcagcaggatgcggaggaggcccgaacaggcctggtgggaggcaaggcgacacagccctgcccctcactcccggcgcccctctgaggcatccggagaccagagagagggccatctggctcctccctagtcacacaccatgggctcagcttctccagaccagacaaaaagccactgaatggggacgggaagagatccaggtgcggggaagctgccggcaaaggcccg

SEQ ID NO: 5464 - DNA, 127 bp, Homo sapiens; identical to SEQ ID NO: 4599
  misc_feature 1..127: note = U/M: M (0.54:0.18) in Adipocytes
  misc_feature 1..127: note = source = chr7:27225772-27225898; Gene: HOXA11 (promoter-TSS)
  source 1..127: mol_type = genomic DNA

SEQ ID NO: 5465 - DNA, 493 bp, Homo sapiens
  misc_feature 1..493: note = U/M: M (0.58:0.09) in Adipocytes
  misc_feature 1..493: note = source = chr14:62035107-62035599; Gene: FLJ22447 (Intergenic)
  source 1..493: mol_type = genomic DNA
cgctcaggactggggtttgtttttgttcctgtaaaactggattggttctgcagaggcacaaacaagcccgttgatttagatctatcgaggaattggggtaggggcaggggtggcagttttgctaagaagaaaagcaggtgaaagtgggagattccaaaagagaccagagagaaggcagtgtgtcctgcccaatctgccgctagggtcagagaccagctccctagtcacactcggccaaggcaggctgccgggctgactccaactctaaacaaagccaggcagccgcccaggtgggtgaaggctgcagattgcgctcaggcgtgacgccggggtgcaggtgggagcgacgcccgggtgcgtgggtgcagcgctcgcccgcccgcggttaggcgcaccgcgggaaccggtcaggtgcgccgtgtggggcggggcggaggcagggcgtgcgcccccaggctggtgcctggggcagaggattcgcctgcttgacgcg

SEQ ID NO: 5466 - DNA, 156 bp, Homo sapiens
  misc_feature 1..156: note = U/M: M (0.55:0.12) in Adipocytes
  misc_feature 1..156: note = source = chr11:850093-850248; Gene: TSPAN4 (intron)
  source 1..156: mol_type = genomic DNA
cggacttcgcgcgcggcggccccttccggcgctacagcagcctatacgggcgcgcgggcggcggggacgccgggggctccttcttcggcctgcacgcgaaccccggccccaaggcggcccaggcgcgctacacgtcgcccaagggcaacaagtacg

SEQ ID NO: 5467 - DNA, 152 bp, Homo sapiens
  misc_feature 1..152: note = U/M: M (0.55:0.14) in Adipocytes
  misc_feature 1..152: note = source = chr6:85476296-85476447; Gene: TBX18 (Intergenic)
  source 1..152: mol_type = genomic DNA
cgccagaagaagttccgttcagctgaggtgccccgccccaatcccaggctctcggggaccccaagaagggagctacccggtgcttctccgagcggtccttacagctttggagactctgctgctgcccaggggtgtagtcgtcggagccctcg

SEQ ID NO: 5468 - DNA, 225 bp, Homo sapiens
  misc_feature 1..225: note = U/M: M (0.53:0.15) in Adipocytes
  misc_feature 1..225: note = source = chr9:79075274-79075498; Gene: GCNT1 (intron)
  source 1..225: mol_type = genomic DNA
cggccacagctttttgtgggctgaatttgatgggtgggaggtgagagacgtggtctggaagttgtctcttcgtctggcattctgccccccttccagagctgttctgaaaggccggtttgttttatagaggggaggaggagggcttagtagtttttaaagatcagtgtaaattacctgctaggagcttaggcaattccaggcaggcccccctgctggaggctttcg

SEQ ID NO: 5469 - DNA, 416 bp, Homo sapiens
  misc_feature 1..416: note = U/M: M (0.54:0.16) in Adipocytes
  misc_feature 1..416: note = source = chr11:44325473-44325888; Gene: ALX4 (intron)
  source 1..416: mol_type = genomic DNA
cggtttatacatctgcagagaagaggtgtgccgggctgcacctctggaggccgcggtaactgatattagagaagaccccggttgcagctgggaaggctcactggctggaaagaggtgcctcctccttccagcaaagggccctgtttggaagggctgcttctcacctgtctagtggcaccacaggacggtcggcttccactcgaattcccccggacggtatcatcacatagccgggtcctcgcagtgttggtttcccaatccgatgactgtcacctcggtgaggacctgtgctgatggccggagaaccctgcgctgcgggcgcacatggccaggtggcgcctggcaggcgacgtccgggtgcaggacggcgctcttaccgccccaccccaaaccgttgcctgggcctaggtccttcg

SEQ ID NO: 5470 - DNA, 112 bp, Homo sapiens
  misc_feature 1..112: note = U/M: M (0.54:0.21) in Adipocytes
  misc_feature 1..112: note = source = chr14:95237828-95237939; Gene: GSC (Intergenic)
  source 1..112: mol_type = genomic DNA
cgggtgcaagctcccggcttgcaactcaggccactccaggggaaggggcagtacccgacccaggcgatacccccgagagccggagagggagatggggttgcgggagacctcg

SEQ ID NO: 5471 - DNA, 272 bp, Homo sapiens
  misc_feature 1..272: note = U/M: U (0.14:0.93) in Neuron CNS
  misc_feature 1..272: note = source = chr1:229476664-229476935; Gene: CCSAP (intron)
  source 1..272: mol_type = genomic DNA
cgggcatggtggctcactcctgtaatcccaacactttgggaggccgaggcgggcggatcacgaggtgaggagtttgagaccagcctgaccaacatggtgaaaccccgtctccactaaaaatacaaaaattagccgggcgtggtggcgcgtgcctgtaatcccagctactcgggaggctgaggcaggagaatgacgtgaatccgggaggcagaggttgcagtgagccgagatcgcgccactgcgctccagcctgggccacagagcgagactcc

SEQ ID NO: 5472 - DNA, 449 bp, Homo sapiens
  misc_feature 1..449: note = U/M: U (0.15:0.91) in Neuron CNS
  misc_feature 1..449: note = source = chr2:210526620-210527068; Gene: MAP2 (intron)
  source 1..449: mol_type = genomic DNA
cgtttgatattttacaaattagaggaaaaaaaccaacatcagataaagttttgtttcattgtacagctataaggtagtttgtcccataaaaatctgtctttgctctgtagtccagtcttaaggtaggatgagattttcttaagacggtaattcttaatcgatatatgaggaaaacttggtttctcaagacttgtttccattaaaccctatgactcaacaaattaaggtatgattttattccttggaattttaattgcctacaaacacttcaagttgtgaagagcaaggctctatctaacacaatataataggatatttaaaaactgaggttaattgcattcacatgtacttctatgtgtgttcctcaagaaaattcctcccatgcactgtggaaatcagtctcgtttcttgtctcgctttgtgctaaatgtcagaactacatcacaagc

SEQ ID NO: 5473 - DNA, 77 bp, Homo sapiens
  misc_feature 1..77: note = U/M: U (0.18:0.92) in Neuron CNS
  misc_feature 1..77: note = source = chr20:61812020-61812096; Gene: MIR124-3 (Intergenic)
  source 1..77: mol_type = genomic DNA
cgaaggagctgcagagctgagtgcgcaccttcttgggccaggccttaccatagctgtagcaccgtctgccgcagtgc

SEQ ID NO: 5474 - DNA, 114 bp, Homo sapiens
  misc_feature 1..114: note = U/M: U (0.2:0.94) in Neuron CNS
  misc_feature 1..114: note = source = chr1:156388230-156388343; Gene: C1orf61 (intron)
  source 1..114: mol_type = genomic DNA
cgaggcgggcagatcaagagatcaagagatcaagaccatactggccaacatggtgaaaccccatctctactaaaaaaaaaaatacaaaaattagctgggcatggtggtacgcgc

SEQ ID NO: 5475 - DNA, 200 bp, Homo sapiens
  misc_feature 1..200: note = U/M: U (0.18:0.92) in Neuron CNS
  misc_feature 1..200: note = source = chr19:14314665-14314864; Gene: LPHN1 (intron)
  source 1..200: mol_type = genomic DNA
cgccccttggagagaaagagggcctgcaggggtgtcccagagcagatgccacacacacatggggtggaccgagcggggccatgagggaggtcaccaagctgggtaggaagatggtggcaagaccagcaggagggccgggacccacatgtgagcgcacacgtatgtcgcacacgtatgtggctccgtgcacgggtgcgatc

SEQ ID NO: 5476 - DNA, 32 bp, Homo sapiens
  misc_feature 1..32: note = U/M: U (0.18:0.9) in Neuron CNS
  misc_feature 1..32: note = source = chr15:70699828-70699859; Gene: TLE3 (Intergenic)
  source 1..32: mol_type = genomic DNA
cgtggcacacgcgagcaaattgcagcaccgcc

SEQ ID NO: 5477 - DNA, 242 bp, Homo sapiens
  misc_feature 1..242: note = U/M: U (0.22:0.92) in Neuron CNS
  misc_feature 1..242: note = source = chr2:51254072-51254313; Gene: NRXN1 (intron)
  source 1..242: mol_type = genomic DNA
cgctctatctgcaaaaggcagagcactgcccgtgaaccctgtctttctcgtcctttaccacgagtgaccagaaccacgtggggattctcaaccacggccgtggtatacctctcctgtgcttcatttctcatcaaacacatgcccaatcttctagatgcttgtttgcatcttaagggcaaagtctgtgtgttacagatttagaagtggtagagacaagtacagtggtcatataggtgggccgc

SEQ ID NO: 5478 - DNA, 260 bp, Homo sapiens
  misc_feature 1..260: note = U/M: U (0.29:0.95) in Neuron CNS
  misc_feature 1..260: note = source = chr1:151034869-151035128; Gene: MLLT11 (intron)
  source 1..260: mol_type = genomic DNA
cgctctgttgcccaggctggagtgcagtggtgcaatcttggctcactgcaacctccacctccccagttcaagcgattctcctgcctcagcctcccgagtagctgggattataggcgcctgccaccacacctggctaatttttgtatttttagtaaagacggggtttcactatcttggccaggctggtctcgaattcctgaccttgtgatccacctgcctcggcctcccaaagtgctgagattacaggcgtgtgccaccgc

SEQ ID NO: 5479 - DNA, 60 bp, Homo sapiens
  misc_feature 1..60: note = U/M: U (0.31:0.96) in Neuron CNS
  misc_feature 1..60: note = source = chr17:43177214-43177273; Gene: NMT1 (intron)
  source 1..60: mol_type = genomic DNA
cggcagcgcgttccaaagcccagcgcagatgcactacagggtctgtgacgcccctctgcc

SEQ ID NO: 5480 - DNA, 327 bp, Homo sapiens
  misc_feature 1..327: note = U/M: U (0.29:0.93) in Neuron CNS
  misc_feature 1..327: note = source = chr7:44427912-44428238; Gene: NUDCD3 (intron)
  source 1..327: mol_type = genomic DNA
cgaagcctggtgatcccagtgaagcaactccggccccctaactctcacgatagtctctctgcctgtgaggtatccctcaggacgcctgaataaaatgtggctaacctgctacatgaggccacatgagggcacacacctaccttctaggtgtttcctcatttgattttctaaaaaaaggctacagtcactaaggacattttacatgaaacctctgcgtgttgcaagcctccatatgctgcagaccctgccccagacactgtcatgcccaggaaggagttgagactttagcatcagcaccaggcaggtgcctggacacacacagtgaac

SEQ ID NO: 5481 - DNA, 406 bp, Homo sapiens
  misc_feature 1..406: note = U/M: U (0.29:0.93) in Neuron CNS
  misc_feature 1..406: note = source = chr16:15223252-15223657; Gene: MIR3180-4 (Intergenic)
  source 1..406: mol_type = genomic DNA
cgccactgcactccagcctgggcaacagagcgagactccgtctccaaaaaaagaaaaacgaaaacaaaaagggaatgccagaagggcaattccaatgaaaggaaaatagaggtattgaagaaacagccacggggagggtgctggcgcctccgtctgagagacgagctatgcagtcaggatcgcgggtggatgcacggtctcccacagtggtagcgatgctcatgtcacttgtggggccacgctactgtgcagaatgtgggctgcccaccctgactgactggcacctacttccagctaggagctgtcctagtcctcagggacagtgagtgctcacgaggtcattcccaggatgaacacacgagcccttcacacagcactgcaaaaactgccttgttctgacgtctgc

SEQ ID NO: 5482 - DNA, 291 bp, Homo sapiens
  misc_feature 1..291: note = U/M: U (0.28:0.92) in Neuron CNS
  misc_feature 1..291: note = source = chr11:1301635-1301925; Gene: TOLLIP (intron)
  source 1..291: mol_type = genomic DNA
cgggcattcatgtcctggtctggttggctccacagaaaccagtgggggttgtgcccacagagacgcaggccaggatgacgggagggactgcgccggtgaggacgtgggggcagcagagaaaagagagaagcactccaggcccgtgtgaaatggaggtgcacgagggaacagatggaaacagcgtcaacgggcagctgcagccacggtgagcacagaatgagctcatgcacaccctggtgctgcctatgcgggccaggctggggaggcgccggacgccccactttccaggcc

SEQ ID NO: 5483 - DNA, 353 bp, Homo sapiens
  misc_feature 1..353: note = U/M: U (0.25:0.89) in Neuron CNS
  misc_feature 1..353: note = source = chr4:2417547-2417899; Gene: ZFYVE28 (intron)
  source 1..353: mol_type = genomic DNA
cgacccttcaaacaatcaagatatttaactccaaagacatttctcaaataagagacagcccaagttcagactgcccacagggcaccagctcccagaaaaatgctatggccagagacagatctgaaatggagatacgtctcaagtccagagctctggagctactaccagacagcatgccaggagaagacaacgagaaaaaggagagatccacatcaatcctgttccatcccttctccggaggcacacagctctgggctgatccctgggatcagctgattcactggctgtgccctcttggtgcccgccgcctgcctggaaaggcagctgcctgctgaagaggaaaagttgggaac

SEQ ID NO: 5484 - DNA, 498 bp, Homo sapiens
  misc_feature 1..498: note = U/M: U (0.28:0.92) in Neuron CNS
  misc_feature 1..498: note = source = chr18:13374254-13374751; Gene: LDLRAD4 (intron)
  source 1..498: mol_type = genomic DNA
cggagccctctcagccctgaccccacacagtctcctgtggaggccagagctgggtcatggactgcaggctgccgatgggagcaagctctcatgcaggagtggctgtctgtccattgttggtctgtggagaaggttctagagccaaagaacctggagtctagaatctcactaattagatgtggtccccagcagcatcagcatcccctgggagctggttggaaatgcagcctcttgggccctgccccggacctgctgaaccgaatctgcagtcaccacatccccggaatttgcaggcaccttaatctcaggaagctctggtctggatcttcgctttcccagaacagccgtgcatcagaatcacctttggagctgatgagacactgcagagtcctgccccagccccgacagatagtgattcaattggtctggggtgattctgccacccagccaggagtgggacccgtgctctgaaatggtcatccctgttggctgaggggc

SEQ ID NO: 5485 - DNA, 391 bp, Homo sapiens
  misc_feature 1..391: note = U/M: U (0.3:0.94) in Neuron CNS
  misc_feature 1..391: note = source = chr12:133306612-133307002; Gene: ANKLE2 (exon)
  source 1..391: mol_type = genomic DNA
cgccagggtcctgctgtgattcagaggatggcagagcccatttctgctgctgtgtggacctcccggctcggcggcttctatgaggtctgcctcctgctccaaggggaaggcgctgcacctcgtatgtccaaaagcaccgactgtgggcgggctgttatttcgagctgcattttgccgattttttatttcttccaagctcatgtcatcttcatctagaaacgccctcacggaaatggaattgctgcctgtgaggacaacaaggagcacttcagtgatgggaacgacaggaagccacggagctgctccgccccatccatgaccaactgccgtgaccccagcaacagcaactcttatacccaaaacctccccactccatccgcgaccaactgcc

SEQ ID NO: 5486 - DNA, 195 bp, Homo sapiens
  misc_feature 1..195: note = U/M: U (0.3:0.91) in Neuron CNS
  misc_feature 1..195: note = source = chr5:145986293-145986487; Gene: PPP2R2B (intron)
  source 1..195: mol_type = genomic DNA
cgacacagacacatactagcttgtttctgaactatcccttgaaatacacctccttggtccaagtgtctctcatttcaatgtcacccccaccctggctgtgatgacgcgggcagatgagagtgagtgtacaggaaacaagccagtgggacatgagggtccgctcacgatgaaaaaggaacgggctcggaatcatgc

SEQ ID NO: 5487 - DNA, 189 bp, Homo sapiens
  misc_feature 1..189: note = U/M: U (0.23:0.77) in Neuron CNS
  misc_feature 1..189: note = source = chr1:1951709-1951897; Gene: GABRD (intron)
  source 1..189: mol_type = genomic DNA
cggggcctggctggccgccttccctaggagtcacgagaggacatttaggggcgtctttgaaaatcacctcagtgcaaagactgcagaagaaacagcaaagagccatcccccagcattcaggatctcagagaccgtgaagatgtagatatagaggtggctgaccgtagtagagatggcagcacccaacac

SEQ ID NO: 5488 - DNA, 115 bp, Homo sapiens
  misc_feature 1..115: note = U/M: U (0.36:0.88) in Neuron CNS
  misc_feature 1..115: note = source = chr22:45343200-45343314; Gene: PHF21B (intron)
  source 1..115: mol_type = genomic DNA
cgcaaggcagggctctgctgcctttgtttttaagcagaccgacgcatgggcaggtgactgacagccatggatgctaacttaggaagtgcccgctgggccttaaatcctggccagc

SEQ ID NO: 5489 - DNA, 84 bp, Homo sapiens
  misc_feature 1..84: note = U/M: U (0.15:0.93) in Neuron CNS
  misc_feature 1..84: note = source = chr11:63451294-63451377; Gene: RTN3 (intron)
  source 1..84: mol_type = genomic DNA
cgaaagtagtagaattatatcgtgaagtgctgttccaagtacatgagtttgcattacattttccgaataatattaaatgccgcg

SEQ ID NO: 5490 - DNA, 79 bp, Homo sapiens
  misc_feature 1..79: note = U/M: U (0.14:0.9) in Neuron CNS
  misc_feature 1..79: note = source = chr19:18313277-18313355; Gene: RAB3A,RAB3A (intron,exon)
  source 1..79: mol_type = genomic DNA
cgggaatccaaccgagccgggcgggagccctccagctgggacccacccagatctgcagcttgatcctcttgtcgttgcg

SEQ ID NO: 5491 - DNA, 340 bp, Homo sapiens
  misc_feature 1..340: note = U/M: U (0.08:0.84) in Neuron CNS
  misc_feature 1..340: note = source = chr20:60638378-60638717; Gene: TAF4 (intron)
  source 1..340: mol_type = genomic DNA
cgcaggagggacccacgctctccttgcagttcctactactgctgccaccgcgctgctacaactgcacggcacgcgtcaccacaggccggggaggagctcccctgcccagcacccaccacggcggctggggagggacggggagccccagacaaaagcagcaatgctggccaggcaatctttcctgtcaaacttgaggggccctgaggagtcgcagagacagcagactagacaggagcgtgagaactgccaggcggaagtggcgtcggagccccaggcatccgcagcatagccagtatcgccccgagacccctgcacggagcgagaacatctgctgccaccg

SEQ ID NO: 5492 - DNA, 357 bp, Homo sapiens
  misc_feature 1..357: note = U/M: U (0.15:0.91) in Neuron CNS
  misc_feature 1..357: note = source = chr2:39895425-39895781; Gene: TMEM178A (intron)
  source 1..357: mol_type = genomic DNA
cgtaagacggaactcatatactcgttaaaagaactagattttcccagtcacgaatgcctatttttagatgaaaacaatctcagctttataatattgatggtgtttagctaatcttttgtgtagaacactgaagagttctaggttgtgaacagaagatatgggccccattgctggctctgttgctaaattgcagtgtgttctccaagtatcaagaccttcttcgccttcggtttccttgtctgtggtattattaggagggatgactattctttagagaaatttctagttcacatatctgtcattgttataattaataacaatgtaaatttagcttcttgcaaagttaatgagccaacg

SEQ ID NO: 5493 - DNA, 188 bp, Homo sapiens
  misc_feature 1..188: note = U/M: U (0.15:0.9) in Neuron CNS
  misc_feature 1..188: note = source = chr16:11773368-11773555; Gene: SNN (TTS)
  source 1..188: mol_type = genomic DNA
cgtggagcaggctgtgctgctcttccagggcccgctgctgctgccgcagccggtgctcatctctgcgggcactggagagctgggactccacctgcacttgtgctcgctggaggctgcttatttctgctctcagtttctggatctctctctccaagtgggagatgtgcccccgctgtaagactgcctcg

SEQ ID NO: 5494 - DNA, 328 bp, Homo sapiens
  misc_feature 1..328: note = U/M: U (0.12:0.86) in Neuron CNS
  misc_feature 1..328: note = source = chr2:51253728-51254055; Gene: NRXN1 (intron)
  source 1..328: mol_type = genomic DNA
cgaatatccttagaaaatctcttgcaatcccttacatgcatccctgtttattagtctgcagaagcttcccaatccagcaacatctaaatttctctactactttatttctctttataaggcatttgttaattaagaaatcttatttaatctctaacatttttaaacgtcagctgacctcacacttcaagaaaccgcataaatgacaaaattttacttaaatttcacaaatgttggacttggatataacagtggaaaccaacattattccaaaaagcctcctgctaatgaagaaacgcttcacatcctctctttccctttttccacaacg

SEQ ID NO: 5495 - DNA, 182 bp, Homo sapiens
  misc_feature 1..182: note = U/M: U (0.17:0.9) in Neuron CNS
  misc_feature 1..182: note = source = chr11:784136-784317; Gene: NS3BP (Intergenic)
  source 1..182: mol_type = genomic DNA
cgcaaagaaaaaacgcacaggccgagagcagtggctcacgcctgtaatcccagcagtttgggaggccgaggcaggtgcatcgcttgaggacaggagttcgagactaggctggccaacatggtgaaaccccatctctactaaaaatacaaaaaaaaaaaaaaaattaaccggctgtggtggcg

SEQ ID NO: 5496 - DNA, 259 bp, Homo sapiens
  misc_feature 1..259: note = U/M: U (0.14:0.87) in Neuron CNS
  misc_feature 1..259: note = source = chr1:241518958-241519216; Gene: RGS7 (exon)
  source 1..259: mol_type = genomic DNA
cggaagtttcccgttttccaagaaactgaagacattcttacctttctgtacaccagcatgttgggtgattcatcggccaccccgttgctggtctgcccataattattcccctgggccatgtcacccaaaacttggtccactctcaagatacaagaattatcagtgtgccctgcaaagggtcagagagacttcagtgagatcccagtgggactcccctgattcatcatcatcattcacagcacccaccccacatggcgcg

SEQ ID NO: 5497 - DNA, 76 bp, Homo sapiens
  misc_feature 1..76: note = U/M: U (0.2:0.91) in Neuron CNS
  misc_feature 1..76: note = source = chr10:11321389-11321464; Gene: CELF2 (intron)
  source 1..76: mol_type = genomic DNA
cggaggtctgagaatgtcgaattggaggcgctcccggagtggtgaagtgtgcttggtacatccacaaagactcacg

SEQ ID NO: 5498 - DNA, 201 bp, Homo sapiens
  misc_feature 1..201: note = U/M: U (0.16:0.87) in Neuron CNS
  misc_feature 1..201: note = source = chr1:151684072-151684272; Gene: CELF3 (intron)
  source 1..201: mol_type = genomic DNA
cgggtgcgcatgcgcaagcaaagcgtgtcgtgggggcagatgctcagggtgcatgggctttcacctccttctctcctgtgctctagccaaagcactcaggaaattccctcacaggcacctccgcagccaggcacccacccctacacccacgccaaaagaagcagaatcagaaccagggttgggggattcttacgcttggcg

SEQ ID NO: 5499 - DNA, 222 bp, Homo sapiens
  misc_feature 1..222: note = U/M: U (0.16:0.86) in Neuron CNS
  misc_feature 1..222: note = source = chr1:9912213-9912434; Gene: CTNNBIP1 (intron)
  source 1..222: mol_type = genomic DNA
cggcctccactcagtgagccgggtctcccccacagccggcatgtgctgacctccttccaactgctctaccaagagagggaggacgcacccagctgtcgggagggccagagatggagggcccaactacaaggatgcaatgcacaagacacaccttccacttggcactagagaaccaaggtgctgctaagggaatgagccttgtcacctcccactgccagctcg

SEQ ID NO: 5500 - DNA, 290 bp, Homo sapiens
  misc_feature 1..290: note = U/M: U (0.19:0.88) in Neuron CNS
  misc_feature 1..290: note = source = chr13:113747701-113747990; Gene: MCF2L (intron)
  source 1..290: mol_type = genomic DNA
cgtgctctgctggctgacagtggtgcccaggcccagctcccttctctgcacagacagcagagttccgcttagcacaggcttttccttgccagcgcagacgctgtcagccattggaactggcctgcaagacagcttgctgtggcggctttgcaggcacagggcacacaggcatccgtgcacgcagctcctctgtcctccccatgccccacaccctccatcgcaaggaaacgcttgcttccagtggtaccaaataggatttggaaccagtttgtgcccaagctcaaatctcg

SEQ ID NO: 5501 - DNA, 363 bp, Homo sapiens
  misc_feature 1..363: note = U/M: U (0.18:0.87) in Neuron CNS
  misc_feature 1..363: note = source = chr11:123397344-123397706; Gene: GRAMD1B (intron)
  source 1..363: mol_type = genomic DNA
cgggcagtccctaggggcatccctctgaggggccaggctccatcttctaggatgcctggtgtccagaggcgagtggaccgctgcctaccccaacacaagcactcaccttgggcctttgcaagtgcctgttcctgggcttaatcttgggacattaaaggcatctctcgcttggggtgtgggagtagctgtattctagctacagaagtagtcagaatatttttaccttccatttaaaaaataaaacctttacctctctctgttttttgacccaataaggagattgcacgggcaggtgaattggcttttcatctggtggagaaactgcagattttgcttggaaaactttgccataccagtgatccg

SEQ ID NO: 5502 - DNA, 496 bp, Homo sapiens
  misc_feature 1..496: note = U/M: U (0.19:0.88) in Neuron CNS
  misc_feature 1..496: note = source = chr12:41087794-41088289; Gene: CNTN1 (intron)
  source 1..496: mol_type = genomic DNA
cgccgcatttttcggtttctaagtgtacatatgaaccttaccagcccgaagtgtaacgcaaatcaaattaatacatgccgtatctgggatattttattagactcggcataatggtttggttatttggtagtaaatttatttcagtggtaacttatggctaacagcatttggggatctgggaatggatccacccactttccaggactaaggaactgctagaacccttgcgggggtagatgtgaggtatttctttgtacagattttacatgtggacctgatatttaaatttgtactgctttttcatatcacatctatttgtactatgtgaactttcttttatagattgatgtatgtgcatttatctttgccattccctgaaattacttattcctgatgacaacctttccattttcacagatgaagaaactaagattcagaagacacaagtgattggttgaaagtcttctgaaaactttaatattccaacaacctgccg

SEQ ID NO: 5503 - DNA, 90 bp, Homo sapiens
  misc_feature 1..90: note = U/M: U (0.2:0.88) in Neuron CNS
  misc_feature 1..90: note = source = chr4:153023924-153024013; Gene: PET112 (Intergenic)
  source 1..90: mol_type = genomic DNA
cggacacccatcaccccagccttgtctcagtcagagcttgaatcatcccgacgatcctcctcggtctcatttctctctgtgtctgtgacg

SEQ ID NO: 5504 - DNA, 150 bp, Homo sapiens
  misc_feature 1..150: note = U/M: U (0.19:0.87) in Neuron CNS
  misc_feature 1..150: note = source = chr14:105783388-105783537; Gene: PACS2 (intron)
  source 1..150: mol_type = genomic DNA
cgtgcatcctcggacagtctgctacttagttttgctttgttcctcctgagttcttctgtactcctcacttttgcccagccatgaagcttctgggctgcgtgtgtgctgatgcctttcggcgtgttcactgctgcgtactattcactggcg

SEQ ID NO: 5505 - DNA, 354 bp, Homo sapiens
  misc_feature 1..354: note = U/M: U (0.22:0.9) in Neuron CNS
  misc_feature 1..354: note = source = chr8:74679595-74679948; Gene: STAU2 (Intergenic)
  source 1..354: mol_type = genomic DNA
cgcgttctaatccctggaacctgtgattatcaccgtatatggcaaaaaatgtgactcacatcctgaaaggagaagcttatcccagattatctggttagactctacaagcaatcacactcattagagaaaggaggggaaattttgggatagacacagagaagacatacagaagaggaaaaggcaatgtggctacaaaggcagagattggagcgacgcgactgtgagccaagaaacgctgtctctactaaaaatacaccgtctccactaaaaatacaaaaattggctgggtgtggtggcacgcgcctgtaatcccagctactcaggaggccgaggcaggagaatagcttgaacccg

SEQ ID NO: 5506 - DNA, 210 bp, Homo sapiens
  misc_feature 1..210: note = U/M: U (0.22:0.89) in Neuron CNS
  misc_feature 1..210: note = source = chr16:30428390-30428599; Gene: ZNF771 (intron)
  source 1..210: mol_type = genomic DNA
cgcctctgcgccctgccgttccctctgcagtgctcctcagagggctatccacgtagcctgctctgtcacctcctttaagtctttgctcatgttatcatatcggtaaagtgtcttgacaaccctgtttaaatctgtagcatccccaataccagcattccttatccattatttctgaaagcaggaattttttaatgctttttatttaatgcg

SEQ ID NO: 5507 - DNA, 499 bp, Homo sapiens
  misc_feature 1..499: note = U/M: U (0.15:0.82) in Neuron CNS
  misc_feature 1..499: note = source = chr15:83377031-83377529; Gene: AP3B2 (intron)
  source 1..499: mol_type = genomic DNA
cggtcccaccccatttcccttcgctgactcttttttcggactcagctggcctgcacccaagtgattaaaaagctttattgttcaaagcctgtttggtggtctcttcacatggacgtgcgtgaaaatcctcatcttctccccctgtccctctaaacccccacccaatatccaattaatcatcaggtctgaggcttccacctcttccacagcctcaaatcttctgcctctcccctggtctaggccacaatcatgccaggcctgtgaacttcaagacccacctcccttgtctcttgttcaatctggcccacctccaatctcttctccacaatgcagcagcctgacgtccttctaaaatataaatctgattatgtcgcctgcttagaatccttcaggagtcctccccaccctcttttctggtcagtccagtggctcacacagattgtggcctggctctcaaccttcctgaaagccctttcctctgcctggaacatacctcacg

SEQ ID NO: 5508 - DNA, 52 bp, Homo sapiens
  misc_feature 1..52: note = U/M: U (0.2:0.86) in Neuron CNS
  misc_feature 1..52: note = source = chr16:752506-752557; Gene: FBXL16 (intron)
  source 1..52: mol_type = genomic DNA
cgcggaatgaatgaattagggaacgaatgaatgaatgcggaatgtggctccg

SEQ ID NO: 5509 - DNA, 190 bp, Homo sapiens
  misc_feature 1..190: note = U/M: U (0.25:0.91) in Neuron CNS
  misc_feature 1..190: note = source = chr1:111144600-111144789; Gene: KCNA2 (exon)
  source 1..190: mol_type = genomic DNA
cgcgtgaaagagagatactcgatatatatttatatacactggatccacagacctgcctgtcatcaggaccagatgccctggtccactgtacagtcatgcccgcgactaggttaattcctaaggtgcagtcatgtgaggtgttcagatgctgccttccccgcttactcttctggctttgcagaggtctgcg

SEQ ID NO: 5510 - DNA, 64 bp, Homo sapiens
  misc_feature 1..64: note = U/M: U (0.12:0.77) in Neuron CNS
  misc_feature 1..64: note = source = chr9:137981452-137981515; Gene: OLFM1 (intron)
  source 1..64: mol_type = genomic DNA
cggtctgtgccacgctgccggctgggaggttgctgtagctcggggttcatcacagctctgggcg

SEQ ID NO: 5511 - DNA, 71 bp, Homo sapiens
  misc_feature 1..71: note = U/M: U (0.25:0.9) in Neuron CNS
  misc_feature 1..71: note = source = chr12:1947361-1947431; Gene: CACNA2D4 (intron)
  source 1..71: mol_type = genomic DNA
cgcgatctctactggtccgctgccctctgtgtgagccggtggtgttatacacggcagtgacgcgcagcccg

SEQ ID NO: 5512 - DNA, 257 bp, Homo sapiens
  misc_feature 1..257: note = U/M: U (0.22:0.87) in Neuron CNS
  misc_feature 1..257: note = source = chr14:102464020-102464276; Gene: DYNC1H1 (intron)
  source 1..257: mol_type = genomic DNA
cgtcattgtagccatttaaaccttccaccacccagaaactgccacatccacttttcttcatgcattgaagtatttattgagcaccgactgtgttccaggccttgttctaggtcattgagatatagcagtgagtgaaaaggacaagagcctcctaccttcatggaatcacgctccgtgggagagagaaaaaaaatgagcaagaagagacaggaaaggcaggtggtggtgctgctgcgacagaagcagatgagagggcg

SEQ ID NO: 5513 - DNA, 402 bp, Homo sapiens
  misc_feature 1..402: note = U/M: U (0.22:0.87) in Neuron CNS
  misc_feature 1..402: note = source = chr3:184057683-184058084; Gene: FAM131A (intron)
  source 1..402: mol_type = genomic DNA
cgtaggctagacaagattttagagatgtgttgtgaccagctgcactccaggaaaactgtttacattatatcttacctcattcatccagcctttgcatttttgtttgcttgtttttgagacagagtctttttctgtcgcccaggctggagtgcagtggcacaatcttggctcactgcaatctccgcctcctgggttcaagcaattctcctgcctcagcctcctgagtagctgggataacaggcacccgccaccatgccctgcccattttttaaattatttttagtggagatggggtttcaccatgttggcctggctggtctcaaactcctgacctcagatgatctacccaccttggccccttggcctcccaaagtgctggaattacaggcgtgagccaccacg

SEQ ID NO: 5514 - DNA, 462 bp, Homo sapiens
  misc_feature 1..462: note = U/M: U (0.22:0.87) in Neuron CNS
  misc_feature 1..462: note = source = chr5:140903584-140904045; Gene: DIAPH1 (intron)
  source 1..462: mol_type = genomic DNA
cgttctggatgcagggactaaaaagatgcttagagcatcattatttgctctttagccgcagactggcaggagtagagagccctcacccccttcgacacccaggatgagctccatgtgcttacttaccttgacggggccctctcttccgtcggaatgctgcccctgactgcagggcttctagaagactgtccatcacacctgtctcatcgccctctgttataaagaacaagatggagatgtgaactcttcagccagagcagcatggcaaatatcaagccccacacaaaatgaatggctattgcttgatttcccctctcccacagcagctggcagctaagaagaggcaaagagagctcagccttaagtctcacacgctcatgtttacttgtatctgctaaaaaatggttaaaacaaaagatctcattgcctattatccaatgcagaccttgggatattttcccg

SEQ ID NO: 5515 - DNA, 63 bp, Homo sapiens
  misc_feature 1..63: note = U/M: U (0.25:0.89) in Neuron CNS
  misc_feature 1..63: note = source = chr16:752640-752702; Gene: FBXL16 (intron)
  source 1..63: mol_type = genomic DNA
cggtcagcggggaaggcacagctcgggaaattaacccggatcgtgccatggccagtgtccgcg

SEQ ID NO: 5516 - DNA, 234 bp, Homo sapiens
  misc_feature 1..234: note = U/M: U (0.25:0.89) in Neuron CNS
  misc_feature 1..234: note = source = chr11:64402890-64403123; Gene: NRXN2 (intron)
  source 1..234: mol_type = genomic DNA
cgctccccccttcccaaagatgtatgtggtcccggctgcagagagaaggaaagggagacaagaagaaatgacatcaggaggacgaggtcagcaggtcctcagggttgtgaccagagggatggaaccccaggtctagatgtgggacttcagctgtgatacccacagcagccaccagccctgccaccccagggagaagttggcaggcgggtgcctgggtgagagcctgtgcacgcg

SEQ ID NO: 5517 - DNA, 330 bp, Homo sapiens
  misc_feature 1..330: note = U/M: U (0.23:0.87) in Neuron CNS
  misc_feature 1..330: note = source = chr11:117741663-117741992; Gene: FXYD6 (intron)
  source 1..330: mol_type = genomic DNA
cgcttcagcatcattatccctttacatcaaatccattctaagctcagaacaaccaaaggatctgtagggaatttttcaggcatttaaaactttctcggtatcctccttcctccattgcctcatttctaatctctgtgtctctgtcaaatcccaactaccaaaatgctgtgaggaatcagcctctctcctttgacttcagcttttaagcatctctcagacctcagatggggtcaaattcttagtttctagactctaccaaagcaagtgggagactgaggtgacgcacggtaataaagggatgtgcatcttgggaacgcgtggtgtgcaccg

SEQ ID NO: 5518 - DNA, 496 bp, Homo sapiens
  misc_feature 1..496: note = U/M: U (0.26:0.9) in Neuron CNS
  misc_feature 1..496: note = source = chr11:123433332-123433827; Gene: GRAMD1B (intron)
  source 1..496: mol_type = genomic DNA
cgtccagataacagactcttaaggtctgtagttttgcatctggcctagagatcctcatataaacactcagaattttagtgtaacctgagttggggtaaaattgttcatccttctgccgaaacttggatttgtctcattgggggaagtggtgggggtgtttgcttcttggagggatatgcacccccacttagcctacaggagaaggttgaagcactatacccagagactcctaaaggaacagtgagcaatttcttgattcttttgattcagaaaatgactgaaaatatatgtttgcattgtgattcccaaagcaggtgaagtgatgattctgctctattctgagcggctcaggccacttctctgcagtattacaactctgtctgggcttcacagttaagaaagttgagatcacccggactccgttcagaggagaaggagcccagtcgctggctgagggagccatcgccatgttaatgtgagagtccagcaggtgccg

SEQ ID NO: 5519 - DNA, 58 bp, Homo sapiens
  misc_feature 1..58: note = U/M: U (0.23:0.86) in Neuron CNS
  misc_feature 1..58: note = source = chr1:183388184-183388241; Gene: NMNAT2 (promoter-TSS)
  source 1..58: mol_type = genomic DNA
cgccgggtgcggtggctcatgcctgtaatctcagcactttgggaggccgaggcgggcg

SEQ ID NO: 5520 - DNA, 75 bp, Homo sapiens
  misc_feature 1..75: note = U/M: U (0.26:0.89) in Neuron CNS
  misc_feature 1..75: note = source = chr4:6344599-6344673; Gene: PPP2R2C (intron)
  source 1..75: mol_type = genomic DNA
cggaccctcggtctcctcatctgtccaatggcagaaatgctcaccttcctgcatccaggacgctcttcattcgcg

SEQ ID NO: 5521 - DNA, 78 bp, Homo sapiens
  misc_feature 1..78: note = U/M: U (0.28:0.91) in Neuron CNS
  misc_feature 1..78: note = source = chr11:64400262-64400339; Gene: NRXN2 (intron)
  source 1..78: mol_type = genomic DNA
cggcggtggggagaacgaagccgctcctacagcaaataattatgggagtcaaaattaatttggcaaagtggagcgacg

SEQ ID NO: 5522 - DNA, 286 bp, Homo sapiens
  misc_feature 1..286: note = U/M: U (0.26:0.89) in Neuron CNS
  misc_feature 1..286: note = source = chr16:255465-255750; Gene: LUC7L (intron)
  source 1..286: mol_type = genomic DNA
cgtagacccactgactgtgggcagatgctaggaatggaggaggctgtctgaggagagggtacatggagaatctctgtactttcctctcaatttagctatgaagctaaaactgcttgcaaaaacagcgtttataaatttttttgagacagagtctcgctctgtcgcccaggctggagtgcagtggcgcaatctcagctcactgcaagctccgcctcccgggttcacgccattctccttcctcagcctccggagcagctgggactacaggtgcctggcgccatgcccg

SEQ ID NO: 5523 - DNA, 353 bp, Homo sapiens
  misc_feature 1..353: note = U/M: U (0.28:0.91) in Neuron CNS
  misc_feature 1..353: note = source = chr8:41751840-41752192; Gene: ANK1 (intron)
  source 1..353: mol_type = genomic DNA
cggctagtaaaacaagataacaccatttggggggaggaatatattaaatattatcatctaccaccaaaagaaaaaaaaagaaatgaggtttactacaaatgtaaagattaagagcaaagaagcaaaaagaatattgaaatcaccgctttcacatgtgtgtattatacatatttggaattcagagttatattaaagggaattttcacagaatggaaaagaatcacaggagagggggtgggagagggttttttgactattttcaaaaaatgatatatggtgtcgggagtgtcaaggaggaaggctgcgagagagaggtggatgagaacactgagtgagcagctcggagaggagcg

SEQ ID NO: 5524 - DNA, 388 bp, Homo sapiens
  misc_feature 1..388: note = U/M: U (0.28:0.91) in Neuron CNS
  misc_feature 1..388: note = source = chr2:26202681-26203068; Gene: KIF3C (intron)
  source 1..388: mol_type = genomic DNA
cgtcacttctccaagctttaattcctcacctctgaaatggggatttcagaactgtgaccctggatggccaaaggatccaatgagatcatgtatggatcatatatatggggcattttttgaactgaagcactaaccaaatgatattattaaaacgacgtgaggtttgaagatgctgcagagggaggaagcctcaggggaggaggctgtgaaggaacaagaacccacattcacaagaggctgcctggccatcccacagacctgactgatcctgaggccaccagcaggaaatgcccacagcaggtcagaccaccccaagctcactggcttgagagaccgcctgtccacgttgcttcgtgtgtgtgtgcctgtgcatgtacctggcagcccg

SEQ ID NO: 5525 - DNA, 470 bp, Homo sapiens
  misc_feature 1..470: note = U/M: U (0.26:0.89) in Neuron CNS
  misc_feature 1..470: note = source = chr17:2712162-2712631; Gene: RAP1GAP2 (intron)
  source 1..470: mol_type = genomic DNA
cgctgagggcccatgtgggtgcctatgtggtgccttttttggctttagcgagttcctatggtaaccatgaacatgcctgttttgggatctggagtctcggggcgtgcgtggctgcagggagaagcagggaaggcgagcgcttagccggtggttggcttgatttcattaccaggcaccggggctgctcctggaggtaccatttgccaggcggcaaggtctgcagactccaagacccatgtgctcctggccctcctcctggccagtccctgccatgcccaggaagccctggtgagtccctgttctggtttctcattggacaaacagctccccggacttggccaggtcttgtgggtatctgctgatgggcaggcagggagccggctggcagccctggccagtaggtaccaggaattggggctcttctgagatgagtgtgggacagtgggcaggaggggctttgcctattcacg

SEQ ID NO: 5526 - DNA, 478 bp, Homo sapiens
  misc_feature 1..478: note = U/M: U (0.31:0.94) in Neuron CNS
  misc_feature 1..478: note = source = chr19:58236184-58236661; Gene: ZNF671 (intron)
  source 1..478: mol_type = genomic DNA
cgcctggccgactttaggcatttgacacagatctctaactaacttaatgcaggcagcaggagataaatacccatgctcagctgcatcatgaaaacggaagaaactggaacacattcaacaccctcaacacattccagctacatcaaaagagtctggttcctaccttctggccttaggataatgacagaatgtagtacatcctaagttccagagagttaccaaaaacagagacagcattctggacaaacacaaagattagagaagcaccttaaatctttggccagatggattcgtgagatccttctactacactaggcaagactgggagaagtagtgaacttttttttttttttgaaatggggtctcagccaagcatgatgactcacacctgtaatcccagcactttgggaggccgaggcgggtggatctcctgagggcaggagttcgagaccagcctggccaacatcgtgaaaccccg

SEQ ID NO: 5527 - DNA, 47 bp, Homo sapiens
  misc_feature 1..47: note = U/M: U (0.23:0.85) in Neuron CNS
  misc_feature 1..47: note = source = chr9:138910662-138910708; Gene: NACC2 (intron)
  source 1..47: mol_type = genomic DNA
cggtgcagcctgctgtgattacacacgcggagaagccgcacggtgcg

SEQ ID NO: 5528 - DNA, 208 bp, Homo sapiens
  misc_feature 1..208: note = U/M: U (0.24:0.86) in Neuron CNS
  misc_feature 1..208: note = source = chr15:79202515-79202722; Gene: CTSH (Intergenic)
  source 1..208: mol_type = genomic DNA
cgaacctggcctctgtgaaattttagatcctgaactggggccagcctcctctcctcccctcccttctgagggagtccccttaagatcttttcctgccgtgagcctgcttcagcgcatcccagaccacccgaatggctgtccccaatttcatctctgggttcctgtgcaaattggtccaccttgcaccctggaatcccgagagagatcg

SEQ ID NO: 5529 - DNA, 286 bp, Homo sapiens
  misc_feature 1..286: note = U/M: U (0.23:0.85) in Neuron CNS
  misc_feature 1..286: note = source = chr2:85658853-85659138; Gene: SH2D6 (Intergenic)
  source 1..286: mol_type = genomic DNA
cgattcacagcaaagaaagagccacagggtagaagcaaagggaagagtcatcccttttgtacattttttaaagctacacagatacaagtggtcccatcccatcctatcccgccccatccttgcctcctgctctcaccatctgcgctcaccagccccactgtgcccacagctgaagggagcagtgagcctgccggtggccggaaagcagggacctatctttgggaggcgaggtaatggggatgtcctctctttctgtggctccaccctgggacggggagtactcccg

SEQ ID NO: 5530 - DNA, 220 bp, Homo sapiens
  misc_feature 1..220: note = U/M: U (0.27:0.88) in Neuron CNS
  misc_feature 1..220: note = source = chr11:47605869-47606088; Gene: NDUFS3 (exon)
  source 1..220: mol_type = genomic DNA
cgttatgatgatgaagtgaagcgggtggtggcagagccggtggagttggcccaagagttccgcaaatttgacctgaacagcccctgggaggctttcccagtctatcgccaacccccggagagtctcaagcttgaagccggagacaagaagcctgatgccaagtagctccagggaacgcatgtggatcctagacagcgccttatctatgattgagtgtccg

SEQ ID NO: 5531 - DNA, 419 bp, Homo sapiens
  misc_feature 1..419: note = U/M: U (0.3:0.91) in Neuron CNS
  misc_feature 1..419: note = source = chr1:209796880-209797298; Gene: MIR4260 (promoter-TSS)
  source 1..419: mol_type = genomic DNA
cgaagacatctccagcctcagggccacaagcttggggctgccggtgcctcctcctcctcccgcctgccgcaccagcctctctgcctctctccggctgtccctgagctggtccaaaaggcgcgagctgtcggagacctgctgagcagcctgggctgactgctcgtaggctgtgctcagcatccggaaggctcctgtggcgagaagcatgaggaatggagatggaggaggagcaggagggagagggggtggcatgcccaccacggcagtgcccatgcccggggttatccgggtgcccctctcctcacctgaaggatcagcactgcttattttttcaaactgctccctcttcctctgatacatagtaaggagaccattgaagcttctgtcaagactctccaggtctctcggaagggacaacg

SEQ ID NO: 5532 - DNA, 216 bp, Homo sapiens
  misc_feature 1..216: note = U/M: U (0.33:0.93) in Neuron CNS
  misc_feature 1..216: note = source = chr16:85452473-85452688; Gene: MIR5093 (Intergenic)
  source 1..216: mol_type = genomic DNA
cggagcagaggtgggataggagagagagagaaccttagaacatctccaagtctgttgacttgagcggctggaaggttagtgttgccaggaggagcaggtttgggggtgggagaggcgctggagctccgtcctggccatgtgagagctgccgtgagacactgtgcggagatccaactggcagttggatatttgagtctggagctatgaatgtgggcg

SEQ ID NO: 5533 - DNA, 481 bp, Homo sapiens
  misc_feature 1..481: note = U/M: U (0.3:0.9) in Neuron CNS
  misc_feature 1..481: note = source = chr7:44316367-44316847; Gene: CAMK2B (intron)
  source 1..481: mol_type = genomic DNA
cgctggccgaaccctcggcctgcctcagctgggtgaaatctagagtcctccacatcccggctctgctaaccaccagctaggggaccccgtccacctctcagcttcttcgggactcagctttccccccatgtgaaaggggagcccacgctcagctcagagggtgggaggacatgagacagcgtcgatgatgccaggagctccaccctgagctgaagggccattccagggcacggaccctgcaccaggctctccacagcatgggccgctaaccagggtcaccccgctgcactgcttcctacgcacgcttccctctacacagggcgtccaacaaggcacaacaaaactgtccccaaaagaacagccgttcattgtggacaatgagcagcaggggctgggcaagcgggcggggggttggggtagggggtagataacaacaagacatgttttaagacttgtgtgcctaatgatctctttacccccg

SEQ ID NO: 5534 - DNA, 234 bp, Homo sapiens
  misc_feature 1..234: note = U/M: U (0.35:0.94) in Neuron CNS
  misc_feature 1..234: note = source = chr17:29038739-29038972; Gene: SUZ12P1 (intron)
  source 1..234: mol_type = genomic DNA
cgatcgcacccgtgcacggagccacatacatgtgcgacatacgtgtgcgctcacatgtaggtcccggccctcttgctggtcttgccaccatcttcctacccagcttggtgacctccctcatggccttgctcggtccaccccatgtgtgtgtggcacctgccctgggacacccctgcaggccctctttctctccaaggggcgcccatctcaatccccacttctgggaagcttgcg

SEQ ID NO: 5535 - DNA, 254 bp, Homo sapiens
  misc_feature 1..254: note = U/M: U (0.32:0.91) in Neuron CNS
  misc_feature 1..254: note = source = chr7:150789017-150789270; Gene: AGAP3 (intron)
  source 1..254: mol_type = genomic DNA
cggaggcaggagaacatagtgtggctctcggaacggcaagttggactctgcagctcgggtgttgagttgtaggagatgggtgggtgaggtgggcaggaccctggtgaaggagtatttcatgctttctccagtatttatttccaccctgccgtgttcctagaaaccgcaggagttggtgcgtcattctgcgaaagatgggcgtcacaagcgtttaagcctttgagaaggcttgagccacgccagcatccacaccg

SEQ ID NO: 5536 - DNA, 233 bp, Homo sapiens
  misc_feature 1..233: note = U/M: U (0.31:0.89) in Neuron CNS
  misc_feature 1..233: note = source = chr12:121592388-121592620; Gene: P2RX7 (intron)
  source 1..233: mol_type = genomic DNA
cgtctctcatttcatcctcacaatccatgaggcaggtatgactattcttcccattatccagagagggaaaacaagtcacacggaagcaagtcacgcagcagagctaggattggaacagaagtgcctgcatcctccaacgcctgcatcccaacccgctgtgctatgcctcccgttgatgctttcccatgtctgccatttagctttgctctggtgagtgacaagctgtaccagcg

SEQ ID NO: 5537 - DNA, 442 bp, Homo sapiens
  misc_feature 1..442: note = U/M: U (0.26:0.84) in Neuron CNS
  misc_feature 1..442: note = source = chr19:51045764-51046205; Gene: LRRC4B (intron)
  source 1..442: mol_type = genomic DNA
cgctctgtcactcaggcgggagtgcattggtgtgatctcagctcactgcagactccacctcctgggttcaagctattctccttcctcagcctcccaagtagctgggactacaggcatacgccactatgcctggctaattttggtatttttagtagagatggggtttcaccatgttggccaggctggtctcgaactcctaacctcaggtgatctgcctgcctcagccttccaaagtactgggattacaggcatagccaccgcgcctggccatgatattttaaaaaacacatcctctgtcttactatggggaccacctactgtctctgtcatgtggcagaagaacattttaactctctcaccaaagatgaatggcaacgttctagcttcccagagagaggccagcaccgtcaccccgtggacttagagtcccccaaagtccccg

SEQ ID NO: 5538 - DNA, 191 bp, Homo sapiens
  misc_feature 1..191: note = U/M: U (0.28:0.85) in Neuron CNS
  misc_feature 1..191: note = source = chr4:2357948-2358138; Gene: ZFYVE28 (intron)
  source 1..191: mol_type = genomic DNA
cgacggctgcatgcacctgagacctgggcagccaatgggaagccttccctgggactgttcacaggaggctgacggagcctctgcacccactcgctctccggcagatgctgcctgagcaaccactctgctaggagccgatctggacctgggacacagcccagagcaagacagacccagaccccgcccccccg

SEQ ID NO: 5539 - DNA, 318 bp, Homo sapiens
  misc_feature 1..318: note = U/M: U (0.26:0.83) in Neuron CNS
  misc_feature 1..318: note = source = chr20:1900281-1900598; Gene: SIRPA (intron)
  source 1..318: mol_type = genomic DNA
cggccccagaaccctccctgcctcgacacaccaagatgtcacggaggagtctgttccctcctcctttaaaatgcttccagcttctgtaaatggctcttctggagggaggcgcctgtgatcttgtgttttgaaagccaattcgccaaacttgtttcctgaggggattgtttagaaaaggggagagaatcctcacttggtggtttctgctccttgtatcatttgggtttgtcatgagccacagggagcagggtttgagccttttcttggtgtttctgctctgctttgttctgctgcctgaaggataaatgtgtagattcg

SEQ ID NO: 5540 - DNA, 333 bp, Homo sapiens
  misc_feature 1..333: note = U/M: U (0.32:0.89) in Neuron CNS
  misc_feature 1..333: note = source = chr3:13094209-13094541; Gene: IQSEC1 (intron)
  source 1..333: mol_type = genomic DNA
cgttgtccctttctatgttagccattcagacagacgtacgtggtgccatgtctgtttttttttttaaatgaaaggtctcacatatttattactgaacccagccaaccaacgcgttcataacatattcagagagaaaaatatattcccaataaaacatgtccaactctccagatagtggtgacattttctgcttgatacggcaacatgattgtgaccttgagacagcatcaatatgtgtgccatctcatgtgcaattctttatagacccagcttggttcttctccaatgtctccttttggagttgtgcctgattttattaccagttttcatccg

SEQ ID NO: 5541 - DNA, 362 bp, Homo sapiens
  misc_feature 1..362: note = U/M: U (0.33:0.9) in Neuron CNS
  misc_feature 1..362: note = source = chr12:123425582-123425943; Gene: ABCB9 (intron)
  source 1..362: mol_type = genomic DNA
cgactcctgggacccacccctgctactagagaggaggcaggtatagggaaagcaaggagttctggcggggagatgcaggaggccacctgaccacccactggtgcattagataacgacagtaaggggagctgaggacagcagcatcactagcactctaccggccatccagctgagtgggtgccatcatccccacaggagcagatggaagcgaaggaaccggcaggggtgtggcacagtgggaatccagccttgatctttcaattgcgatagcatagctttttttttttttttttaagatggagtctccctctgtcgcccaggctggagtgcattggtgcaatcttggctcactgcaccctccg

SEQ ID NO: 5542 - DNA, 396 bp, Homo sapiens
  misc_feature 1..396: note = U/M: U (0.17:0.74) in Neuron CNS
  misc_feature 1..396: note = source = chr9:140035658-140036053; Gene: GRIN1 (intron)
  source 1..396: mol_type = genomic DNA
cgccaaagctctaagaggcacaggcagacttggggacagacgcaggtccttgctgtgtgaaggtggtgtggaccaccagctgcctgcctccctgccttgggaggctggggagagagggaggcatcagctccagggggctgagccgctggctttagatctgccccatggggccttggtcatgggcaggaaggctgggctgcacccccaatgcctcccttcccttccttgaggatgaggccagcactcaaagtaagggcttggtgttgttcagacagagcccgtcacaggccctgcccctggagacaccagcaaaagggatctcggcctctttggcagctcctagctgcttccccctgaagtccggtaccacccttcagagctgcccgccctgtctcg

SEQ ID NO: 5543 - DNA, 410 bp, Homo sapiens
  misc_feature 1..410: note = U/M: U (0.32:0.89) in Neuron CNS
  misc_feature 1..410: note = source = chr17:56166789-56167198; Gene: DYNLL2,DYNLL2 (exon,TTS)
  source 1..410: mol_type = genomic DNA
cgcagtaaacaaaaccaaacctctttctgtttagttgcctgggggaagaaggctgctttatgtttatttttcaagactttaaaaatattttttggttgtattgcactaggaaatctctcccacctctcccttttctctttctttccctatacaaaataaaaggcccaccatagagactaggcggccgaaagactaggagggctgaggaaaagaaataggtctctggaggtggaactaaaactgtgcagctgcctcttcctggcggtggatgctgctttgggagggccagggaggctgcagggggacagtgttgggattgtcaaggaaaaaggggtaggaaggaaggtggagggattgatctagtaccagggagaatattccactgaactgtgattctatggcttggggcg

SEQ ID NO: 5544 - DNA, 486 bp, Homo sapiens
  misc_feature 1..486: note = U/M: U (0.29:0.86) in Neuron CNS
  misc_feature 1..486: note = source = chr9:141008005-141008490; Gene: CACNA1B (intron)
  source 1..486: mol_type = genomic DNA
cgcaggaaggtgcccaactgcatcttgcgggagacgtgagggagtgccgggaggtgcccaactccatcttgtgggagacgtgagggagcgcaggaaggtgcccaactcctccttgtgggagacgtgagggagcgcaggaaggtgcccaactgcatcttgcgggagacgtgagggagtgccgggaggtgcccaactcctccttgtgggagacgtgagggagcgcaggaaggtgcccaactccatcttgtgggagacgtgagggagcgccgggaggtgcccaactccatcttgtgggagacgtgagggagtgccgggaggtgcccaactccaccttgtgggagacgtgagggagcgcaggaaggtgcccaactccatcttgtgggagacgtgagggagcgccgggaggtgcccaactcctccttgtgggagacgtgagggagcgcaggaaggtgcccaactcctccttgtgggagacgtgagggagcg

SEQ ID NO: 5545 - DNA, 80 bp, Homo sapiens
  misc_feature 1..80: note = U/M: U (0.26:0.82) in Neuron CNS
  misc_feature 1..80: note = source = chr19:50195540-50195619; Gene: CPT1C (exon)
  source 1..80: mol_type = genomic DNA
cgaccctcgctgacctcggacggggctgaagtggaactcagtgcccctgtgctgcaggagatctacctctctggcctgcg

SEQ ID NO: 5546 - DNA, 185 bp, Homo sapiens
  misc_feature 1..185: note = U/M: U (0.28:0.83) in Neuron CNS
  misc_feature 1..185: note = source = chr7:97668445-97668629; Gene: OCM2 (Intergenic)
  source 1..185: mol_type = genomic DNA
cggctcactgcaacctccgcctccagggttcaagcaattctcctgcctcagcctccggagtagctgggattacaggcacctgccaccacgcccacctaatttttgtatttttagtagagatagggtttcaccatgttggccaggctggtctctgactcctgacctcaagtgatccacctgcctcg

SEQ ID NO: 5547 - DNA, 372 bp, Homo sapiens
  misc_feature 1..372: note = U/M: U (0.32:0.87) in Neuron CNS
  misc_feature 1..372: note = source = chr4:3531996-3532367; Gene: LRPAP1 (intron)
  source 1..372: mol_type = genomic DNA
cgcctgcacacttggctccaggatagaacaccctcacagcaccgccaccctccaagcttccgttatctggaaggaaaatcaggacgaatgggctctgcaggcctgcctgccatagtaccaggctctctggaatgggggaagacacacaaaatcccccaaaacaccctcacccccgaagaacttcacgttctgttcagcaaaaaagacttgcccacacaactagaacttcaggacttaaagggaccagaaagatcatctagtccaaggctcagtccaaagtggaggtgagcagctcgccctaccatggtgcccagtgaacctcagggaggtttaggagacatgacccaacccaagactgaaactggtcaggcg

SEQ ID NO: 5548 - DNA, 345 bp, Homo sapiens
  misc_feature 1..345: note = U/M: U (0.31:0.85) in Neuron CNS
  misc_feature 1..345: note = source = chr9:137994537-137994881; Gene: OLFM1 (intron)
  source 1..345: mol_type = genomic DNA
cggtttgtccaagttcccagctttgcagacttcttccagcttaagtcttcccggattgcaggaggtaaaagctgtgaccaagggagataggctcagaggacaggcagcaggacaggaaccccatctgcctgcttcagggcactcagccctcctggtctgtctcctttgttgcccagagacccctctgtctctggcctgaggtcctcagtgggcatctccccgggcctgttctatgagatcgtccatgctgctgcgtagaagtggcctcctcttgtgaatagcaagaggcagattgtctcatccgcaggggcatcagcttgtccaggctcccggccttgcacagcg

SEQ ID NO: 5549 - DNA, 379 bp, Homo sapiens
  misc_feature 1..379: note = U/M: U (0.36:0.9) in Neuron CNS
  misc_feature 1..379: note = source = chr15:31596905-31597283; Gene: KLF13 (Intergenic)
  source 1..379: mol_type = genomic DNA
cgagggtacttagaaagcaatgaacagcatctggtggggactcacacctgtgttcacgcagtgggcacctgtgggcagcttggccaaatagccccgagagaccaagcaactttcctgcccaatgaaatgcaatctgctttcttccttttctctagtcattatttattcatttgaaagatgcttttatgatagaaattcagggctgcacacaggcgtctctaatgagggcattcgggagcagagaaggggaccaggcatccccgctgggcgtgctgggagaggctaacagccttcacgctttggagagccctcagcctgcttcaaagctcctagcctttctcaatttctcctccaaggcatcacagggcagcggtgtgcg

SEQ ID NO: 5550 - DNA, 399 bp, Homo sapiens
  misc_feature 1..399: note = U/M: U (0.33:0.87) in Neuron CNS
  misc_feature 1..399: note = source = chr2:241756926-241757324; Gene: KIF1A (intron)
  source 1..399: mol_type = genomic DNA
cggctcaggcccctcccagctcactgatagatgtgcacggatggtctcaggcctgacgggattggccagctaggcatgtgcagggctcagtaaatcccaatgacctaatgctggtagcccctccatagaccccaatctggtaggaccagggctctgtgggaacgtctcccttcccgtccccaccacacccagttcacctgctttggccggcccggctgagtggcctgaagagatgccctcagtctcctccagggcctcctcctccagctcacatctccccctccacccttcacaaatcccacaggaggactgccctaccctactcccaaagggcatggtgggcccaaggtcagcagtcatgacatcagtgaggactgcggggcacaggctgggcggccg

SEQ ID NO: 5551 - DNA, 103 bp, Homo sapiens
  misc_feature 1..103: note = U/M: U (0.21:0.74) in Neuron CNS
  misc_feature 1..103: note = source = chr5:141263876-141263978; Gene: PCDH1 (Intergenic)
  source 1..103: mol_type = genomic DNA
cgagcctcactctgtcgcccagattggagtgcagtggcgccatctcagctcactgcaacctctgcctcccgggttcaagtgattctcctgccttagcctcccg

SEQ ID NO: 5552 - DNA, 144 bp, Homo sapiens
  misc_feature 1..144: note = U/M: U (0.22:0.75) in Neuron CNS
  misc_feature 1..144: note = source = chr7:71912358-71912501; Gene: CALN1 (Intergenic)
  source 1..144: mol_type = genomic DNA
cggagtctctcgggctgcatggtttgaatcggaaccacagggctgtggacccacgcactgcctaccctaggaagtaccaaggtcctgctcgctgtcttccagaccgagggaaagagcggggctccgtggaggcagggggcatcg

SEQ ID NO: 5553 - DNA, 231 bp, Homo sapiens
  misc_feature 1..231: note = U/M: U (0.33:0.86) in Neuron CNS
  misc_feature 1..231: note = source = chr4:951231-951461; Gene: TMEM175 (intron)
  source 1..231: mol_type = genomic DNA
cgagggctggaagctgggagggaacagacctcgctgccccacagcaggctggtcctgcccagcaaacacaggagagcctcggccagagagggctgcagcccagggcccccagcagcactctgggccagcagggttgggctcccattagcacagagcagaagggtgccagtttctatggaatttcagatgaacagcacgtaacagtcagtgtgccaaatacacataaatacg

SEQ ID NO: 5554 - DNA, 290 bp, Homo sapiens
  misc_feature 1..290: note = U/M: U (0.38:0.91) in Neuron CNS
  misc_feature 1..290: note = source = chr9:140993938-140994227; Gene: CACNA1B (intron)
  source 1..290: mol_type = genomic DNA
cgtgtgtgcctgtggtgtgcacgtgtctgtggtgtgcacgtgcctgtgtgtgcatgtgcctttgtgtgtgtgccaccgtggtgcgtatgtgcctgtgtgtgcctgtgggtgtgcacgtgcctgtggtgtactcgtgcctgtggtgtgcatgtgcctgtggtgtgcatgtgcctgtggtgcgcatgtgcctgtgtgggtgtgcatgtgtgtgcctgtgggtgtgcacatgtctgtggtgtacacgtgcctgtggtgcgcatgtgcctgtgtcggtggattctgaaggcacg

SEQ ID NO: 5555 - DNA, 60 bp, Homo sapiens
  misc_feature 1..60: note = U/M: U (0.25:0.76) in Neuron CNS
  misc_feature 1..60: note = source = chr10:125426324-125426383; Gene: GPR26 (exon)
  source 1..60: mol_type = genomic DNA
cgctcaccttcccagccgccgcgctcgccctgtcctggctcggcttccaccagctgtacg

SEQ ID NO: 5556 - DNA, 98 bp, Homo sapiens
  misc_feature 1..98: note = U/M: U (0.36:0.86) in Neuron CNS
  misc_feature 1..98: note = source = chr15:29077961-29078058; Gene: LOC646278 (intron)
  source 1..98: mol_type = genomic DNA
cgtggtggtgggcgcctgcagtcccagctactcgggaggctgaggcaggacaatggtgtgaacccgggaggtggtgcttgcagtgagctgagattccg

SEQ ID NO: 5557 - DNA, 72 bp, Homo sapiens
  misc_feature 1..72: note = U/M: U (0.09:0.85) in Neuron CNS
  misc_feature 1..72: note = source = chr11:17786781-17786852; Gene: KCNC1 (intron)
  source 1..72: mol_type = genomic DNA
cgccttgttcctgaaacgccagactgcatgaacacagctccccaaggcgaacccccgaacagctccgatccg

SEQ ID NO: 5558 - DNA, 361 bp, Homo sapiens
  misc_feature 1..361: note = U/M: U (0.15:0.85) in Neuron CNS
  misc_feature 1..361: note = source = chr11:17761012-17761372; Gene: KCNC1 (intron)
  source 1..361: mol_type = genomic DNA
cggattctgtgttttggatggactgtgcgtgtgtgagaatgagactgtgtgggagagagtgtgtataaggaagagagactgcatgtgtaagagagatgctgtgtgtgaggtttggagagtgcgtgagagtcgaggtgagtgtgtctgcgtgagtgtgtggctgtgtgtggcaagtgtgaaactgtatatgtggagctcatgtgtgagtctgtgtgtgtgtgtgtgtgtgtgtgtgtgtacatgcgtgtacacataaggcaggaggctgtgtggggtgggggtccctgtgtgtgacagactgtatgtgaaggtgtgtgtaagacagagattgtgtgtgaaatcctgtgtgtgacagtgtacg

SEQ ID NO: 5559 - DNA, 330 bp, Homo sapiens
  misc_feature 1..330: note = U/M: U (0.26:0.93) in Neuron CNS
  misc_feature 1..330: note = source = chr16:87728212-87728541; Gene: JPH3 (intron)
  source 1..330: mol_type = genomic DNA
cggccctggagagctgacttcatgcgggatgtctgctgttctttgcgtagctttactgagacagaaagcgtgtactgttcacttcaggtggccacagtgtacaagtcagggattttagtgtattcccagttatacagccatcacccccaattctatctagatcagctccatcaccttaaacctcagggccattgagcaggcacttgctgtcccctcctcccccagctcccggactctgctttctgcctggtgcccagcttctcacgcagcatgcactgctcctgcgctttctctgtggcagccgcggttgcacggcccatgtcttccccg

SEQ ID NO: 5560 - DNA, 166 bp, Homo sapiens
  misc_feature 1..166: note = U/M: U (0.08:0.93) in Neuron CNS
  misc_feature 1..166: note = source = chr7:127670469-127670634; Gene: LRRC4 (exon)
  source 1..166: mol_type = genomic DNA
cgagggaataccctgcgggacctcggagaggccccggcgcgtgcacaccaccttgctgaactggttactgcacgagcagacggaggggcagttctggggcccggctgaggcggcagcagcgatggctgcacacagaatccacacttgcgccgtgaggtagacgaac

SEQ ID NO: 5561 - DNA, 128 bp, Homo sapiens
  misc_feature 1..128: note = U/M: U (0.21:0.94) in Neuron CNS
  misc_feature 1..128: note = source = chr7:5391292-5391419; Gene: TNRC18 (intron)
  source 1..128: mol_type = genomic DNA
cgctgccaagaacccagatggcagccttcttgcggccatccgcacgggcctcctcacccaccatctctcccgtgcgcccactcgcttccctctcgctcactcgcacgcactctctcgctaggaaacac

SEQ ID NO: 5562 - DNA, 292 bp, Homo sapiens
  misc_feature 1..292: note = U/M: U (0.25:0.96) in Neuron CNS
  misc_feature 1..292: note = source = chr7:127670170-127670461; Gene: LRRC4 (exon)
  source 1..292: mol_type = genomic DNA
cgcatgagggagggcacccggttgaaggcgtaagaggggatgctttcgatggggttgttgcgaagccagagctcccgcagcttggacaggtattcaaaggccccgctagggatgactgtcagccagttgtcgaacagctccagggtgttgaggctggccaggccgttgaaggcccccacctcaatctgccggatggagttcctgcccaactgcaggacctccaggtggtggaggtggcggaaggtgtcggcctggatcatctggatgttgttctccatgaggttgaggtacc

SEQ ID NO: 5563 - DNA, 250 bp, Homo sapiens
  misc_feature 1..250: note = U/M: U (0.12:0.82) in Neuron CNS
  misc_feature 1..250: note = source = chr2:241757494-241757743; Gene: KIF1A (intron)
  source 1..250: mol_type = genomic DNA
cggctgggagcagggctggcacacagcagacatcttgcaggccctcaccacagggacctccctgggcccggcccgggacccctgccttgacaactgattccagcctctgtccaccctgcggacctgcccggggaggacacctgcagggcctcagatccatctgcagccggagtgaagctgttcatccgggccctgccttggacccagcaccctcccgagacttcaccccgggtaaaggctgccctcctcc

SEQ ID NO: 5564 - DNA, 200 bp, Homo sapiens
  misc_feature 1..200: note = U/M: U (0.15:0.82) in Neuron CNS
  misc_feature 1..200: note = source = chr20:34997369-34997568; Gene: DLGAP4 (intron)
  source 1..200: mol_type = genomic DNA
cgggccaggctctgagaacgcagcagagcagacagcccctggcgtgtgtggcccagtgacggagaacgggattccttggcacgagctgggtgagcagccgtcagcatcgcgtggaaagatggaggcccgggcggcagcgagggaggtgttactgctgctattttgctaacaagctggttatttaaagaacagccgaagcc

SEQ ID NO: 5565 - DNA, 18 bp, Homo sapiens
  misc_feature 1..18: note = U/M: U (0.27:0.89) in Neuron CNS
  misc_feature 1..18: note = source = chr22:26847942-26847959; Gene: HPS4 (exon)
  source 1..18: mol_type = genomic DNA
cgcccacgttacgcgcgc

SEQ ID NO: 5566 - DNA, 272 bp, Homo sapiens
  misc_feature 1..272: note = U/M: U (0.27:0.87) in Neuron CNS
  misc_feature 1..272: note = source = chr3:16371412-16371683; Gene: RFTN1 (intron)
  source 1..272: mol_type = genomic DNA
cgggcacccagagctgcgagacaatgaacgacccctgctgcagcccgacccgcctgcttagacagactgcaaaccggctgcttctattttgctccgttttatttcattttgtcactctcttaaagaaaaaatcagcaggatttctcccaaacattttttccccctcagggtaggagatgtcagccagagggtacagaatcataaaggccaaaagcaaaagggaaaacacaacaaaacaaccctgcttgagagagctgaaggttcaatctcac

SEQ ID NO: 5567 - DNA, 345 bp, Homo sapiens
  misc_feature 1..345: note = U/M: U (0.07:0.86) in Neuron CNS
  misc_feature 1..345: note = source = chr11:62474735-62475079; Gene: GNG3 (promoter-TSS)
  source 1..345: mol_type = genomic DNA
cgatccagacgctgatacctgtggcgcatcacattttcctggatatggaaaatggagggtccctgggagagaaacgaagattcaggtgctaagtgctgtgtcagagtagagggaggaaaggaggaggggggcgactgcccagctgatgtcagattttcaaatgagcagggtcccccgcagccagtacagactccactgcaggggccgtcataggcccagaccacgccatttgagagggggagtcggccttggcctcagctctgttggggaggtctctagcccagagtcaggatgcctgcaatgggggaggggcaggcagtgaactagcgacagtgggggtgtgcg

SEQ ID NO: 5568 - DNA, 50 bp, Homo sapiens
  misc_feature 1..50: note = U/M: U (0.11:0.84) in Neuron CNS
  misc_feature 1..50: note = source = chr19:18313493-18313542; Gene: RAB3A (exon)
  source 1..50: mol_type = genomic DNA
cgaagttctgatccgaggactccttctgcccatagcgcgagtctgtggcg

SEQ ID NO: 5569 - DNA, 183 bp, Homo sapiens
  misc_feature 1..183: note = U/M: U (0.17:0.89) in Neuron CNS
  misc_feature 1..183: note = source = chr14:69157866-69158048; Gene: ZFP36L1 (Intergenic)
  source 1..183: mol_type = genomic DNA
cgccccgtttccatggcaaccgcctccccatcttccagagcctctctccggtcctgcccgccccctcctctccaccaccctccgcgtctcatctgtctgggtgggaaccgggattagagttcatcgggccgggatgcttttcccagggccgctttgccttcgtgatccctttgcggcagcccg

SEQ ID NO: 5570 - DNA, 335 bp, Homo sapiens
  misc_feature 1..335: note = U/M: U (0.16:0.87) in Neuron CNS
  misc_feature 1..335: note = source = chr22:32021249-32021583; Gene: PISD (intron)
  source 1..335: mol_type = genomic DNA
cgcaccccggtgtatttttaaaaggtccaggaaggtggcaggggccaagcaaagacaaatcactgctcccctctggctttgccacctgccccactcactgcagaagagcagggaccaactgggaagagctacacccctcccatgggcaggaaggggaatggggaagcctctctcctaggtggggtgcagaggcaagggtctgggctgcgagcagggggcctgggagcaccagggtagggaagatcgcaggcatgaggtctgaggctcgctggcagcctccccctgctgggccctcctcatggttggaaccaaagatacctgaagcgggctctccg

SEQ ID NO: 5571 - DNA, 486 bp, Homo sapiens
  misc_feature 1..486: note = U/M: U (0.16:0.86) in Neuron CNS
  misc_feature 1..486: note = source = chr22:32020002-32020487; Gene: PISD (intron)
  source 1..486: mol_type = genomic DNA
cgtcccaaccccattctgattcaggggcttggctgcctctggctagcggactcatttcccaggctctcccacccgccagccagctggggaggactgggaatgtgggggcagccgcaagaggagagtcaggcccagctgcggggcacctctcagctgcagcagctcccagcaagggcctccaggcccaagcacctgggcccaggaaggggagagcagggtgtagggcctgcctcacatccctcagcctccgcagcccaggagagtgggccccaggggccagctctgccacacaggcactggcacggcagcacatagcgctgaggagctacgacccagccagctgggtaaccatttgctgagtcttccgctaccatcctttgcaggatctgggatatccttttcatggttccaggccccccctttcctcatctgctaaattacggggccaaggccagacaagatctcaaagggagcatttacactccg

SEQ ID NO: 5572 - DNA, 140 bp, Homo sapiens
  misc_feature 1..140: note = U/M: U (0.15:0.83) in Neuron CNS
  misc_feature 1..140: note = source = chr19:51046227-51046366; Gene: LRRC4B (intron)
  source 1..140: mol_type = genomic DNA
cgcacccaggccaggggcaggcgagaacaggagtctctgagccaccccccagagctcacgggagggcgtcgcagggattcgcgtcggctcccaccgacagatggctgcaggcctctgccaaggatccgggcaggagttcg

SEQ ID NO: 5573 - DNA, 172 bp, Homo sapiens
  misc_feature 1..172: note = U/M: U (0.27:0.95) in Neuron CNS
  misc_feature 1..172: note = source = chr10:11343686-11343857; Gene: CELF2 (intron)
  source 1..172: mol_type = genomic DNA
cggcagcaactggctttacccactctgtttctgaagctcttcctattttctctggcacataagcagaagggaatggtttgatgagggtcctgggtggggccacaggctcacccatgtcgtgaggagccccagttaggccgcgggaggtggagtgcgaggcccttgtccagcg

SEQ ID NO: 5574 - DNA, 222 bp, Homo sapiens
  misc_feature 1..222: note = U/M: U (0.21:0.88) in Neuron CNS
  misc_feature 1..222: note = source = chr11:1442511-1442732; Gene: BRSK2 (intron)
  source 1..222: mol_type = genomic DNA
cgtctgcagtctggccctggctcaggcccacccttgcccatctctggctgcagagatgcctgcctctgcttggaagggacctggatcctggaacagcctagggctgggaagctgcttcctcctccacaatctggtccccagtgggagctgcatcccacctttgtttgggtgctgggttaggaggcgggagccaggcagaggcagcggagcggctgcagtgcg

SEQ ID NO: 5575 - DNA, 280 bp, Homo sapiens
  misc_feature 1..280: note = U/M: U (0.17:0.84) in Neuron CNS
  misc_feature 1..280: note = source = chr20:4875680-4875959; Gene: SLC23A2 (intron)
  source 1..280: mol_type = genomic DNA
cgtgacagaaatactgggtactcagcaagaggcagtcaaatgcacaatgcaggatacagaaccgaaacacaacaggggaaccacttcggagctggagaagtctgacactgtgtcttagaaatcacgaaagctggacacgaaaaacttttccttctgctgccctaagcctaaggaaatgagtggtgagcttctccaaagcaaaaacacaacccaaaaaagcccacagaggccatctgccatccttccggcagtgctgctgggagtcaggcctgcacgcccg

SEQ ID NO: 5576 - DNA, 215 bp, Homo sapiens
  misc_feature 1..215: note = U/M: U (0.2:0.86) in Neuron CNS
  misc_feature 1..215: note = source = chr3:10541056-10541270; Gene: ATP2B2 (intron)
  source 1..215: mol_type = genomic DNA
cggaggagcaaactgaggcgaagtcactggttcaaccacacacaaccgaacgcacatgactgaataagcaattcccctcccacgcattacatgggaaaacaaaaagcatttgtaaagtgcttgcggacacattttagcgattagtactattatgatgaacatttcggtacttggcaattaccccataaagtcagtgctgctgcccctattctccg

SEQ ID NO: 5577 - DNA, 294 bp, Homo sapiens
  misc_feature 1..294: note = U/M: U (0.16:0.82) in Neuron CNS
  misc_feature 1..294: note = source = chr22:50764436-50764729; Gene: DENND6B (intron)
  source 1..294: mol_type = genomic DNA
cgccagcgcggggaagcctccctccatctgcaggtgggcctcccctgtgctggtcagctccctggtgtgtgttacacaggacacagagaagatcatcctgcggggcctccctggaggaaaggaggctgcctgtgtgggtaggtgagtggaggcctgcaggcagcagaaagaccacatcgaaagcccatgggcacagccgatgaacagacccccacgagcaagaacaccacaagacgcaggtggagggacggggcccatggggtctggatctgatgctaggtgaacaaggaggcg

SEQ ID NO: 5578 - DNA, 328 bp, Homo sapiens
  misc_feature 1..328: note = U/M: U (0.25:0.91) in Neuron CNS
  misc_feature 1..328: note = source = chr17:30821925-30822252; Gene: MYO1D,MYO1D (exon,intron)
  source 1..328: mol_type = genomic DNA
cgcttctcactgcaggaaccaaaaacaccagacgggcagttagcaggcagcatgagaacagggcacctgcccggcagctcccggccaccattggctccggcgcagcctgcttcctccacaagtgccaggaggatgcctgaagggccccagagaggccgaggcaaggcgagtgtggcactagctgggcctccaaccacagcctcggcaccatggcagggcccttggctcccatgccagcgcatgggactggacagtggagggccatgtggttgaacagacgccaccaggtctctggctggggctgaggaccaagcccctgggtccttcg

SEQ ID NO: 5579 - DNA, 451 bp, Homo sapiens
  misc_feature 1..451: note = U/M: U (0.26:0.92) in Neuron CNS
  misc_feature 1..451: note = source = chr12:122839918-122840368; Gene: CLIP1 (intron)
  source 1..451: mol_type = genomic DNA
cgcgatgcatgcatggcgggcatctgctcggcaaagcaagggcgctgctccagctggcaggctggccaggattaggaaaggcttcctcaaaaacacaagacagtgtgtgccttctgtctataaatctcacaaagaatacatcaacgtaaagagatcagccaggtgcggtggctcatgcctgtaatcctagcacttcaggaggccaaggcgggtggatcacttgaggccaggagtttgagacctggccaagatgatgagaccccatctctactaaaaatacaaaaattagctggagtgcagtggtgcgatctcagctgactgcaacctccacctcctggattcaagtgattctcctgcttcagcctcccaagtagctgggatcacaggcgtgcaccactaccgcccagctaatttttatatttttagtagagacggggttttgccatgttcg

SEQ ID NO: 5580 - DNA, 129 bp, Homo sapiens
  misc_feature 1..129: note = U/M: U (0.19:0.84) in Neuron CNS
  misc_feature 1..129: note = source = chr7:158045060-158045188; Gene: PTPRN2 (intron)
  source 1..129: mol_type = genomic DNA
cggatggctcagatgaaggcggccaactgggcagcgggaatggagcctttctaggcaggcagacccaagcatactgctcctgaattagtgtgtgggttggtgagcactccaggcggacctgatagcccg

SEQ ID NO: 5581 - DNA, 169 bp, Homo sapiens
  misc_feature 1..169: note = U/M: U (0.18:0.83) in Neuron CNS
  misc_feature 1..169: note = source = chr8:41752264-41752432; Gene: ANK1 (intron)
  source 1..169: mol_type = genomic DNA
cgccaagaaagtgggtgagcatcgcagcgtagagccagacttcccctgcctgactcacaagacgggctctggtattttagaccccagcagagggacctgcggagattctctctcggtggcaccaacccaaactctgattcatcatcggtttgaaaaaggccccttttcg

SEQ ID NO: 5582 - DNA, 201 bp, Homo sapiens
  misc_feature 1..201: note = U/M: U (0.25:0.9) in Neuron CNS
  misc_feature 1..201: note = source = chr19:19391733-19391933; Gene: SUGP1 (intron)
  source 1..201: mol_type = genomic DNA
cggtgcggtgcttcccgggggagaaggtgagcaaaggggtgcagcgggccctctgggaagggaaaagatttgggtccttccagctcatcaacactcgggctttgccgctaagaatggcccacatttgcactcttagtccttccttggtttacagggcactgagggatgtgggggagccctgttggggagacgcaggagccg

SEQ ID NO: 5583 - DNA, 173 bp, Homo sapiens
  misc_feature 1..173: note = U/M: U (0.19:0.83) in Neuron CNS
  misc_feature 1..173: note = source = chr4:3531816-3531988; Gene: LRPAP1 (intron)
  source 1..173: mol_type = genomic DNA
cgactggagtgactatttgcacgaacaattctctccccctacgtttgaactgactgtggctcctcctgcctcctgaccaccctgggccctggcacgctcggcagaaagagccacagcacaaagaccacccgggatgcactaccgccactgagaacctcaaaaagacccggacg

SEQ ID NO: 5584 - DNA, 121 bp, Homo sapiens
  misc_feature 1..121: note = U/M: U (0.23:0.86) in Neuron CNS
  misc_feature 1..121: note = source = chr12:1948026-1948146; Gene: CACNA2D4 (intron)
  source 1..121: mol_type = genomic DNA
cggagtcaaagtttggcctggaaattgggtctgggtttagtgtgccctgggcccagggaagcacggcagccaggcgggcacaaatcccttccaagtgctgcaggtggctgcatcgcacacg

SEQ ID NO: 5585 - DNA, 125 bp, Homo sapiens
  misc_feature 1..125: note = U/M: U (0.24:0.87) in Neuron CNS
  misc_feature 1..125: note = source = chr16:89531912-89532036; Gene: ANKRD11 (intron)
  source 1..125: mol_type = genomic DNA
cgcccgcccgcacacatccgcggaaagcctgctttcagctgctcagcaggtgggaacacttgctcctccagcattccaccatgagacaaaggaaaaagtcgcttctgtgtgtccaccagcacacg

SEQ ID NO: 5586 - DNA, 183 bp, Homo sapiens
  misc_feature 1..183: note = U/M: U (0.32:0.92) in Neuron CNS
  misc_feature 1..183: note = source = chr10:126694723-126694905; Gene: CTBP2 (intron)
  source 1..183: mol_type = genomic DNA
cgggcacgcagaacgtggctgaggctggcccgagacctgtccaaggtctgaggctcgaatcctggcagcaggtccttcatggcaaggcgggaaaagagaaaagccaacgggttctcatgctgggaaaagatgccgggcacgacggctggaggtggggggttgggagtgggtgggatgcttgcg

SEQ ID NO: 5587 - DNA, 301 bp, Homo sapiens
  misc_feature 1..301: note = U/M: U (0.25:0.85) in Neuron CNS
  misc_feature 1..301: note = source = chr4:745666-745966; Gene: PCGF3 (intron)
  source 1..301: mol_type = genomic DNA
cgggcgcaggccccctcgctgccacccccactggtgggcactcagcctcaaggcacaggcctcctgggactggtggctcctctgaatcttcctgagagaggcaagtttagtcatcgctgagcaacgcaaaagcgtgtcgggtttatttactcacaacgatgtcttctaaaccaaaaatacttgacggggcctttctttctgttttccgagggaggggatggggatcctcctggaagatggtgccccctgcacaggtgaatggcgtttcccacacttgaccttgggagtttggaaactggcg

SEQ ID NO: 5588 - DNA, 169 bp, Homo sapiens
  misc_feature 1..169: note = U/M: U (0.34:0.93) in Neuron CNS
  misc_feature 1..169: note = source = chr17:8380266-8380434; Gene: MYH10,MYH10 (intron,exon)
  source 1..169: mol_type = genomic DNA
cgctggagtttacgccgagatgcgttggcacgcgtcgcttcttcttctgcttcctccagctggcgtttaagctgcttcatccgagcgttggccttctccatcttggggagggtacatgaaccaaaacaaaccaaactggtgaatccagtgtcggcctctctgtaccccg

SEQ ID NO: 5589 - DNA, 153 bp, Homo sapiens
  misc_feature 1..153: note = U/M: U (0.37:0.94) in Neuron CNS
  misc_feature 1..153: note = source = chr10:126694517-126694669; Gene: CTBP2 (intron)
  source 1..153: mol_type = genomic DNA
cgctgggcgcaaggtgggaatccagagccgctgatgcgtctggggagcctgagaggccattgtcacaagatgtccatccgcagcatcatcagtgcatggatccgttaccagggtaacaaactccaggttgcctagcgatcggctccctccccg

SEQ ID NO: 5590 - DNA, 393 bp, Homo sapiens
  misc_feature 1..393: note = U/M: U (0.33:0.9) in Neuron CNS
  misc_feature 1..393: note = source = chr1:3695942-3696334; Gene: LRRC47 (TTS)
  source 1..393: mol_type = genomic DNA
cgataaagctgatgagtctgcttctcacatggcacccagatcgtaaggcagtggggtctgtaaaatcatcgcggtggctggccgtgtcctcatgagccaagcacactgactcccgggagtggtgtgcacgcacatgtggtgcctggacatacacgaagacacatggacgtgggggtctgacctggacattcacaacggaaacgtctacaacagaaggcgcccaggacccacctttctggcgcataaatgaagatttttggctcaaaaacctaagcatcctccagcttttgctaccatctgtccctcggctggctgaggactgccgatgcttcccaagcagaggcgtctggtccactcctggggctccacctgcctgtcactgcagcaccagcg

SEQ ID NO: 5591 - DNA, 469 bp, Homo sapiens
  misc_feature 1..469: note = U/M: U (0.35:0.91) in Neuron CNS
  misc_feature 1..469: note = source = chr3:133610529-133610997; Gene: RAB6B (intron)
  source 1..469: mol_type = genomic DNA
cggaaggatacatgaacaaatgactaaacaactgagcaacaaaaaggcagctgcctgcatagtcgcttcattgcacagctccaaggaatgctattcacagtatgctcaacatggacagcacctccagcagcacaataccaggggcagggcaggcaggtggctggtcagagcgagaaactggcctgccgtcctcagctaggaaagcagacagagcttttgcgtctccatccagtcttcctgcttttgctggaagagtcttggggaaggggaggtcagaagaagacagtgcacagcagacgcatccctgacccttcccaccacacacactgagatgtgccaagtgaggcctaaaagccgacagaatgccattagagcttaggaggaagacgtgggtcccacaggcccactctcccctcctcaaacacctgctcctgcttgtcttctcggacgccatcaaatgccccagtcg

SEQ ID NO: 5592 - DNA, 35 bp, Homo sapiens
  misc_feature 1..35: note = U/M: U (0.23:0.77) in Neuron CNS
  misc_feature 1..35: note = source = chr19:591318-591352; Gene: HCN2 (intron)
  source 1..35: mol_type = genomic DNA
cgcggcggggttcccggggcgcgagcctgtggccg

SEQ ID NO: 5593 - DNA, 338 bp, Homo sapiens
  misc_feature 1..338: note = U/M: U (0.28:0.82) in Neuron CNS
  misc_feature 1..338: note = source = chr9:35831106-35831443; Gene: TMEM8B (intron)
  source 1..338: mol_type = genomic DNA
cgaatgcacgtgaaaggtcacaacccctgcagagatgtctggtcacttatgtgtatgtgtgtaactgagggattgtggggaggctggcagcatgtgtacatgcttgtgtgttgttaagtgtagacacgtgcatgtgtgtggggtgcatgtgagccagtgtatcttctgagcgcctgtgttatggtatgaaggggaggggacatgttgtggcccatgtacattcctcttcagctctgcctcctcctcatatggacagatcactgaagctgtgaatggggctggagaccctttctcagcagttccaagggtgagggcagtgttgcatgcctcccataacg

SEQ ID NO: 5594 - DNA, 496 bp, Homo sapiens
  misc_feature 1..496: note = U/M: U (0.36:0.9) in Neuron CNS
  misc_feature 1..496: note = source = chr16:255823-256318; Gene: LUC7L (exon)
  source 1..496: mol_type = genomic DNA
cgtgatccgcccgcctcggccttccaaagtgctgggatgacaggcgtgagccactgtgctgggcccaaaatgtataaattttttaaaaaatgggagcaagcatgggctcaattaattccaacggtcaacgctgccaaattactaagatttctcttgccctaaggcacttatctcaccaacctcagcttcttttttcttcgcacgaactttttccacttccataagaatcttctgggattcatccacattaccttcagcccctagctgttcggctttagcaaggagttttcctatttcttcatttaactcatgtactttttctgcctgtgaggagaaagaatgaggtaagcagacatctgaaaatgaaagtgaatgcaaaggcaacaagggtttctcctgctccatttccagtctgaaaataagtggaagagctaaagatccacacttaacaatgaaggcatccttactgccagcattgagactgtaaccataaacg

SEQ ID NO: 5595 - DNA, 108 bp, Homo sapiens
  misc_feature 1..108: note = U/M: M (0.83:0.08) in Neuron CNS
  misc_feature 1..108: note = source = chr4:48130075-48130182; Gene: TXK (intron)
  source 1..108: mol_type = genomic DNA
cgggctgcgcgggaagcaaagccgctgtcgcttcctcatgtctaatgttttgaagtttacatcgtcacctccagttcatcccctggcatttccgatgtcagggtttcg

SEQ ID NO: 5596 - DNA, 40 bp, Homo sapiens
  misc_feature 1..40: note = U/M: M (0.87:0.14) in Neuron CNS
  misc_feature 1..40: note = source = chr3:49941216-49941255; Gene: MST1R (promoter-TSS)
  source 1..40: mol_type = genomic DNA
cggccctcgggtctgagcacctgacgcctgcggacgcacg

SEQ ID NO: 5597 - DNA, 64 bp, Homo sapiens
  misc_feature 1..64: note = U/M: M (0.77:0.06) in Neuron CNS
  misc_feature 1..64: note = source = chr2:58274587-58274650; Gene: VRK2 (intron)
  source 1..64: mol_type = genomic DNA
cgggactcgcccccaggatgtacatttcgtagagtctcccttaccgcctcaagccctgaggccg

SEQ ID NO: 5598 - DNA, 376 bp, Homo sapiens
  misc_feature 1..376: note = U/M: M (0.77:0.06) in Neuron CNS
  misc_feature 1..376: note = source = chr17:78193304-78193679; Gene: SLC26A11 (promoter-TSS)
  source 1..376: mol_type = genomic DNA
cgaggagttggcaggagagctgtttatgttacagtgagccgaacccccgcccagagaccacaaaattaatcagaaagagggcaactggcagggcgccagacctcagaaggggaaagaatcgcaggccttgggtttggccttgtcacttgtcatgagccagagccttgattacctaaaccggaagtcttgtgagcagcacggtgcttgctctggaggaacctggggtttctgagagggactggggttgggggagacggtggtgggtgggtggtggagggctgtgcccttgggataagggaaaagacagctgagacacaggctctggggtcggaaatgagagccaggagggcaccctgtctgcagtctctggggaccg

SEQ ID NO: 5599 - DNA, 94 bp, Homo sapiens
  misc_feature 1..94: note = U/M: M (0.79:0.1) in Neuron CNS
  misc_feature 1..94: note = source = chr16:26963425-26963518; Gene: C16orf82 (Intergenic)
  source 1..94: mol_type = genomic DNA
cgcagcagcacgtgcttgatgcagaacgctggccacaggcacggaactgtccatctccgtgtgctgaaatcagatgtcctaagggatgtgaacg

SEQ ID NO: 5600 - DNA, 291 bp, Homo sapiens
  misc_feature 1..291: note = U/M: M (0.75:0.07) in Neuron CNS
  misc_feature 1..291: note = source = chr16:4250130-4250420; Gene: SRL (intron)
  source 1..291: mol_type = genomic DNA
cgttgcctgaaagcaacaccatggccctgccccatccctccctgtctgtgaatacacaggagacactcacatctctgtggaagtcaagccctggctgggggccaggaagggataaggaggctgagagggtggcaggaatccccagttacagccacagagatgtcacagtatcttaacaccggcccaggcgacaccaaggagagccctagatgttccggttctccgagacaaaccacaaacagggccctttcctggtgctgtggtttcggctcctcacagcagggggcaccg

SEQ ID NO: 5601 - DNA, 188 bp, Homo sapiens
  misc_feature 1..188: note = U/M: M (0.77:0.1) in Neuron CNS
  misc_feature 1..188: note = source = chr19:10541834-10542021; Gene: PDE4A (intron)
  source 1..188: mol_type = genomic DNA
cgtggctcactctctccagcctcactttcctcttctgtcacatagcagcgatcaaaatcatccctgaccgccagggttgccctggagacctctgatagggcatgcagtagacgtttaataaatgttgcatccttcccacttcctgtgcaaacctgaagctgcggtcacgctttggaggagtgagggcg

SEQ ID NO: 5602 - DNA, 248 bp, Homo sapiens
  misc_feature 1..248: note = U/M: M (0.79:0.13) in Neuron CNS
  misc_feature 1..248: note = source = chr1:5720367-5720614; Gene: MIR4417 (Intergenic)
  source 1..248: mol_type = genomic DNA
cgtatgtattgtagtattcagtggcagtgcatacacgtgcacaaacacatacacacacgtgcacacgtgctttgtcatagcctgtttccccaacctctggggaaaatcagtcaacacttcctcctctccaagccacattctttgtagggcagccttgtccctgccagaagccacctcctgcccaggatgactgagcactatttaatcaccctcaatcaagagtgtgactcccacaaaatgacggctcg

SEQ ID NO: 5603 - DNA, 394 bp, Homo sapiens
  misc_feature 1..394: note = U/M: M (0.78:0.12) in Neuron CNS
  misc_feature 1..394: note = source = chr20:61805264-61805657; Gene: MIR124-3 (Intergenic)
  source 1..394: mol_type = genomic DNA
cggtcagtccaaggtctatgtattccttctcactggggccagggaggagggggccaggccgggagcagagagaaaggggccgtggcctcatttccatgcggaggccccaggccctgtgctatccccaccctattgtgcgcctgggcgggctgacaatcgaggtctttgtggtcggttgctgcactcccaccctcagcgctcaggcaggcggggtccctgccacccgctacaaagggtgaggaggagcaagaccaggagaggccctccctctccccaccaggcacggggccccacgactggcctcgtccagacccaagcccaggggacaggtgtggagggagcacctgcagatggagtctccctgctccctgcaccttgcctctgagtttgtgcg

SEQ ID NO: 5604 - DNA, 464 bp, Homo sapiens
  misc_feature 1..464: note = U/M: M (0.86:0.22) in Neuron CNS
  misc_feature 1..464: note = source = chr8:112410169-112410632; Gene: MIR2053 (Intergenic)
  source 1..464: mol_type = genomic DNA
cgtgagaggggcttcaggccgagttaggtcaggagcactctatcttacagacaagagtatttaagggttcagggcaggagagcttatcacaggctcagaatgtttctgtgtctttttgtcttgcttatctgggagggagagtttggggtctgttcccatacgtcttcctgcagctgtaggtattacccccaagtctgcttttagcttccttatcttagtgcacctaaagggaaaggaatgtgcttattagggcccaccgttttactggggcccattgtgtgtgtgaagtttggtggttacccaagagactttcccctctctccctgtgtccaagctgtcttatctgtgttttactgtctgctctttttggctgcttgttgttagaagagaagtgatttccttgaaatgcatgaggttagaaagggagctggaacttaaagtggcagtgtttgtccaagatgacg

SEQ ID NO: 5605 - DNA, 62 bp, Homo sapiens
  misc_feature 1..62: note = U/M: M (0.83:0.21) in Neuron CNS
  misc_feature 1..62: note = source = chr3:129047663-129047724; Gene: H1FX (Intergenic)
  source 1..62: mol_type = genomic DNA
cgccggccaaggaccggtgtagctctgctcctgccctgtcccacaggtggcagcactcgccg

SEQ ID NO: 5606 - DNA, 176 bp, Homo sapiens
  misc_feature 1..176: note = U/M: M (0.81:0.19) in Neuron CNS
  misc_feature 1..176: note = source = chr4:3786115-3786290; Gene: ADRA2C (Intergenic)
  source 1..176: mol_type = genomic DNA
cgtctctgcctctcccacccttgtcacaggctgtccccttctcagaggcactcggagtgcccctgagtctcctctcattccaggaggctgagctggactccccggagccttggggtggggaggggcttggtgggggagctgggggcggggccagccttccttctggcttggatgcg

SEQ ID NO: 5607 - DNA, 219 bp, Homo sapiens
  misc_feature 1..219: note = U/M: M (0.76:0.16) in Neuron CNS
  misc_feature 1..219: note = source = chr5:141132842-141133060; Gene: ARAP3 (Intergenic)
  source 1..219: mol_type = genomic DNA
cgtcggcagcacccgttgggggtgaggacgggagaggaacgtccctccccggggcggggggtggtgttgggaagcgggagaggccacgtgtgtgtgtgtgtgttctgggggccctaggcactgcagacgcgcggtgcggagggagagagacgggcgccaaggagaggcttccgagggggtccccgcggctggagagaggccctgcctgtgtggatagcg

SEQ ID NO: 5608 - DNA, 111 bp, Homo sapiens
  misc_feature 1..111: note = U/M: M (0.75:0.17) in Neuron CNS
  misc_feature 1..111: note = source = chr10:16479398-16479508; Gene: PTER (exon)
  source 1..111: mol_type = genomic DNA
cgcgatcacagctcactgcagcctcgacctcctgagctcaagcgaacttcctgcctcagcctcctgagcttcctgagtagctgcgactacaggcacgtgccaccatgtccg

SEQ ID NO: 5609 - DNA, 39 bp, Homo sapiens
  misc_feature 1..39: note = U/M: M (0.68:0.11) in Neuron CNS
  misc_feature 1..39: note = source = chr17:75911013-75911051; Gene: FLJ45079 (Intergenic)
  source 1..39: mol_type = genomic DNA
cgagcggcaggtatatctgaacggcaccaccatccgccg

SEQ ID NO: 5610 - DNA, 200 bp, Homo sapiens
  misc_feature 1..200: note = U/M: M (0.66:0.09) in Neuron CNS
  misc_feature 1..200: note = source = chr7:137311406-137311605; Gene: DGKI (intron)
  source 1..200: mol_type = genomic DNA
cgacaccttgtggctactgtgtgggaaggaaaagagcagcagaagccggggtgagacccgagtgcctctgtccagtccggtatcacgctctgctgagggtcacctcccatccggatttttgctccattttctaacttgtccctccactgatagtctgtttctccctttattcctcactctatcctgggcactgccacccg

SEQ ID NO: 5611 - DNA, 41 bp, Homo sapiens
  misc_feature 1..41: note = U/M: M (0.77:0.21) in Neuron CNS
  misc_feature 1..41: note = source = chr15:45722312-45722352; Gene: C15orf48 (promoter-TSS)
  source 1..41: mol_type = genomic DNA
cgcccgctaattttttttagtagagacgtggtttcgtcacg

SEQ ID NO: 5612 - DNA, 256 bp, Homo sapiens
  misc_feature 1..256: note = U/M: M (0.62:0.07) in Neuron CNS
  misc_feature 1..256: note = source = chr13:30498244-30498499; Gene: LINC00544 (Intergenic)
  source 1..256: mol_type = genomic DNA
cgttctgcagctttactcagctctttaaactcaaatatttgttttggatgaggaaatggctcagggcatgagcacaatctcaccaagtgtgtgatcctggtgccacgtggccacagcatgattcaggatttctcctgccttagccactcctctaaccaacaacagcacctgagtcacactcctggcgtccttgctggggctaggacccacccctccattggcagcctttgtctccgggggcacgtgcaatacagcg

SEQ ID NO: 5613 - DNA, 116 bp, Homo sapiens
  misc_feature 1..116: note = U/M: M (0.59:0.05) in Neuron CNS
  misc_feature 1..116: note = source = chr5:122180341-122180456; Gene: SNX24 (promoter-TSS)
  source 1..116: mol_type = genomic DNA
cggagttaagtgcaattgtttacagtccaagaaagctcgctggctggttttttcctggatggctgaggtcacttctcagtgacctacaagtcacgtccacgtttctattctgctcg

SEQ ID NO: 5614 - DNA, 295 bp, Homo sapiens
  misc_feature 1..295: note = U/M: M (0.84:0.03) in Neuron CNS
  misc_feature 1..295: note = source = chr14:24457825-24458119; Gene: DHRS4L2 (promoter-TSS)
  source 1..295: mol_type = genomic DNA
cgtggacaagcagatgcagaagggcagcagccaaagtctgcgggttcctgcgggggccaggggaggggcgagccctacaggcaacttgaacggagagcgctttgatcactcaccagcccgggaaggcaagccccagtcaggcggaaggtagctggctgcggggcggggcgactggcgggcggcgggaggcgccaaccgccacagacgactcccagctggccgagggcgggaagggggcaggcagggaagcggcccgcccttcgtcctgccccttcgccctactctgtcacctccg

SEQ ID NO: 5615 - DNA, 233 bp, Homo sapiens
  misc_feature 1..233: note = U/M: M (0.8:0.06) in Neuron CNS
  misc_feature 1..233: note = source = chr15:89962708-89962940; Gene: LOC254559 (Intergenic)
  source 1..233: mol_type = genomic DNA
cgctggaccccaagactctgcaggattcgcctcagtgcagaggctctggattctctggctctgaggcgagatgggagctgtcctcccagtggtgctgaaactcgggctgcctccgttggggtcaccgacagaggctcacttgttcaggcacttcctgggtcagcctttccgcctctgagacgggctctcccatctcagatgggagattctgcctggaagggaagtagtccacg

SEQ ID NO: 5616 - DNA, 490 bp, Homo sapiens
  misc_feature 1..490: note = U/M: M (0.73:0.05) in Neuron CNS
  misc_feature 1..490: note = source = chr7:140103734-140104223; Gene: RAB19 (promoter-TSS)
  source 1..490: mol_type = genomic DNA
cggcgaaggctggtgagaaagccggctctgcgccctgccctgtgctggccgccctcacctggcgctttgtaccctgaggcagctccggactcagggcaggtgggagggattgcactttcctttcactttctcaggacgccaaacccgacacctggggccagaactacacttcccaccaagcagcgaggcaggaggaagaagggggcactggggggctgaaaagcaaacccagaagaaagcgaaaacattacctgctgaccagcagaggtgagagagcgagacaggtaagcgacaggtgaaccaggaaggcgaaggctgcgggatgccggcgggaggacatcatcggggtggacgctgcctgtgcctcccagcaaggcttgtaggctcaatgaaagggggctttagtggaaaccctgaggactcctgagggtggggggagacatggaagtaaagtctcagctcaagttacagtgataagaccaagacaccg

SEQ ID NO: 5617 - DNA, 185 bp, Homo sapiens
  misc_feature 1..185: note = U/M: M (0.72:0.12) in Neuron CNS
  misc_feature 1..185: note = source = chr6:26088238-26088422; Gene: HFE (intron)
  source 1..185: mol_type = genomic DNA
cggtgggggcgcgaaagagtggcgttggggatctgaattcttcaccattccacccacttttggtgagacctggggtggaggtctctagggtgggaggctcctgagagaggcctacctcgggcctttccccactcttggcaattgttcttttgcctggaaaattaagtatatgttagttttgaacg

SEQ ID NO: 5618 - DNA, 156 bp, Homo sapiens
  misc_feature 1..156: note = U/M: M (0.81:0.28) in Neuron CNS
  misc_feature 1..156: note = source = chr22:35626962-35627117; Gene: HMGXB4 (Intergenic)
  source 1..156: mol_type = genomic DNA
cgtggctggggaggcctcagtaaacttaccatcatggcagaacgggaagcagccatatctcacacggcagcaggagaggacgcttgtgaaggaagtgaagggggaggagccccttataaaaccatcagatctcgtgagaactcactcactatcacg

SEQ ID NO: 5619 - DNA, 317 bp, Homo sapiens
  misc_feature 1..317: note = U/M: M (0.57:0.05) in Neuron CNS
  misc_feature 1..317: note = source = chr3:49941263-49941579; Gene: MST1R (promoter-TSS)
  source 1..317: mol_type = genomic DNA
cgccccagccgcctcacctgccgccccagccgccgctgtacactggcgcttagcgctcagccgacccgagggcgccgggctgggcgggcggagtcgggccgtgggggcggggccgcgaggaaggcttggcctagcccaggccctccgcccatccgactcttccggcccttggaggcctggctcctgtaccttcacctggcgtcttggcgcctttttctcagcggcctgtgggtggatgtgcatggtgtggcctggagagaggtgagccagtctgagccgtcccatcccatccccccactaccgactggttcgcagcg

SEQ ID NO: 5620 - DNA, 11 bp, Homo sapiens
  misc_feature 1..11: note = U/M: U (0.08:0.96) in Oligodendrocytes
  misc_feature 1..11: note = source = chr10:102692483-102692493; Gene: FAM178A (intron)
  source 1..11: mol_type = genomic DNA
cgcgcgcgcgc

SEQ ID NO: 5621 - DNA, 165 bp, Homo sapiens
  misc_feature 1..165: note = U/M: U (0.09:0.97) in Oligodendrocytes
  misc_feature 1..165: note = source = chr18:8639631-8639795; Gene: RAB12 (TTS)
  source 1..165: mol_type = genomic DNA
cggcagcattgttcacgagagccgaaaggtggaaaccgccccaatgtccatcagcaaaataatggataaacaaaatgtgtgttctacaaacaatgggatattcatccttaaaaagaaaggaaatgctgtcacatgtgcagcgcggatgaatcttgaagacattac

SEQ ID NO: 5622 - DNA, 121 bp, Homo sapiens
  misc_feature 1..121: note = U/M: U (0.07:0.95) in Oligodendrocytes
  misc_feature 1..121: note = source = chr4:2877658-2877778; Gene: ADD1 (exon)
  source 1..121: mol_type = genomic DNA
cgtgctgcggtggtgacctcaccacccccgaccacagcccctcacaaggagaggtacttcgaccgagtagatgagaacaacccagagtacttgagggagaggaacatggcaccagaccttc

SEQ ID NO: 5623 - DNA, 283 bp, Homo sapiens
  misc_feature 1..283: note = U/M: U (0.07:0.95) in Oligodendrocytes
  misc_feature 1..283: note = source = chr17:4012880-4013162; Gene: ZZEF1 (intron)
  source 1..283: mol_type = genomic DNA
cgccctaaaggatgatgggagaatgagggcatgttgagggggctggaacatagagagaatgacttactgagtattgtgcagcactgtctggacaaaggcgggatttgtctccatagaagccgtcaccagagatgtcagcagagaccaataccatattgcagaagcatctgagactgagaccccagacttcttaactctctgaaagccaacagccctgagaccatgaattctagtgtcgcagccatcgctaagacaacgctttatgttaatctggacatctgtc

SEQ ID NO: 5624 - DNA, 156 bp, Homo sapiens
  misc_feature 1..156: note = U/M: U (0.07:0.93) in Oligodendrocytes
  misc_feature 1..156: note = source = chr16:50830354-50830509; Gene: CYLD (exon)
  source 1..156: mol_type = genomic DNA
cgaagactgctttgtgatgcatatatgtgcatgtaccagagtccaacaatgagtttgtacaaataactggggtcatcgggaaaggcaaagaaactgaaggcagagtcctaacgttgcatcttattcgagctggcagttctgttcacgtccattgcc

SEQ ID NO: 5625 - DNA, 188 bp, Homo sapiens
  misc_feature 1..188: note = U/M: U (0.08:0.94) in Oligodendrocytes
  misc_feature 1..188: note = source = chr4:185707763-185707950; Gene: ACSL1 (intron)
  source 1..188: mol_type = genomic DNA
cgtgctatgggaacactgggacaaactcgccaagctgagacatccaatgttaccagtgtcaagtaaaaaacaataggcactttctttttttttttttttttttgagacggagtctcgctgtgtcacccaggctggagtacaatggtgcaatcctggctcactgcaacctccacctctccggttcaagc

SEQ ID NO: 5626 - DNA, 92 bp, Homo sapiens
  misc_feature 1..92: note = U/M: U (0.08:0.93) in Oligodendrocytes
  misc_feature 1..92: note = source = chr9:129167537-129167628; Gene: MVB12B (intron)
  source 1..92: mol_type = genomic DNA
cgtcccgagaagcagggttagaaatgggaaattattcccttctgagtccagctcgcgagtgcacgagggctctttgtgcagttggtttcagc

SEQ ID NO: 5627 - DNA, 225 bp, Homo sapiens
  misc_feature 1..225: note = U/M: U (0.05:0.89) in Oligodendrocytes
  misc_feature 1..225: note = source = chr13:41148403-41148627; Gene: FOXO1 (intron)
  source 1..225: mol_type = genomic DNA
cgaagttgccaatatggtccagtaggaagagtactagaagtcagggcgtgtatgtctgtgtccaagttagatcattactgcgcgtgtgaatctgagctgtatgatgccctggtgtctccgtaccaaataactgaatggtgcattgtgaagattaaatgagaacatgtttggaaaacataaaacagattatacatgtgaagaatgctaccaatttcaagcatattc

SEQ ID NO: 5628 - DNA, 273 bp, Homo sapiens
  misc_feature 1..273: note = U/M: U (0.1:0.94) in Oligodendrocytes
  misc_feature 1..273: note = source = chr16:72460443-72460715; Gene: PMFBP1 (Intergenic)
  source 1..273: mol_type = genomic DNA
cggaagagaaatgccataggaagcggcatgaatacatgccacagccggtgccacttgccactcggaaaacctcagggaaagatgccaattctacagctgcgaagaaggcagagaaaggaggataaaggtctacaactagaaatcataaggaaagaatactgcttgtataatcctggattgcaattgcacacagcctctgctgggagaagagagggaatatttaaatggagatatagatgggtataaattaaaagataggcacctatcgattgc

SEQ ID NO: 5629 - DNA, 288 bp, Homo sapiens
  misc_feature 1..288: note = U/M: U (0.05:0.89) in Oligodendrocytes
  misc_feature 1..288: note = source = chr18:53014425-53014712; Gene: TCF4 (intron)
  source 1..288: mol_type = genomic DNA
cgcaaaaaacgagggctacgagaaattgggacgtgactaaaaagagcaacatactaaaatacgaaccgagaagataaaaatgtactgcagtaataagcagagctctcgtgggcaattagatagctgtctttcacacaggctttcctttaaaaaaaaaatcaccttagcaagtactggtctatgtgcactagagggacaggcttccccccgacacgctgtgcttgtcctgtagaccctgcctggtgggtcttctgttatcccaccatcgtgtcatacttccacagtgac

SEQ ID NO: 5630 - DNA, 246 bp, Homo sapiens
  misc_feature 1..246: note = U/M: U (0.08:0.91) in Oligodendrocytes
  misc_feature 1..246: note = source = chr6:109153205-109153450; Gene: ARMC2 (Intergenic)
  source 1..246: mol_type = genomic DNA
cgtctttctgctctgccattctaagcgtgtcagtcactggatggctgcagcagctctgggcttcaaatcctcacacaccactctccagaggcagaacaagggaagtactgtgtctttgtgtcccttttttttattttttgagacagagtctcactctgtcgcccaggctggagtgcagtggcgcaatctcggctcactgcaagctccaccttctgggttcacaccattctcctgcctcagcctccc

SEQ ID NO: 5631 - DNA, 332 bp, Homo sapiens
  misc_feature 1..332: note = U/M: U (0.11:0.93) in Oligodendrocytes
  misc_feature 1..332: note = source = chr12:125474255-125474586; Gene: DHX37 (promoter-TSS)
  source 1..332: mol_type = genomic DNA
cgtctgtaatcccagctacttgggaggctgaggcagagaattgattgaacccgggaggtggacgttgcagtgagccgagactgcaccactgcacttcagcctgggcaacagagctagactctgtctcaaaaaaaaaaaaataaagttgtctattacataactttaaattcccattaccgcatcacattgtaacacactgggaaacaatgcattattattattattgagacaaggtctggctttgttgcccaggctggagtgtagtggagcaatctcggctcactgcaacctctgcctcccgggtttaaacgattctcctgcctcagccttcc

SEQ ID NO: 5632 - DNA, 286 bp, Homo sapiens
  misc_feature 1..286: note = U/M: U (0.12:0.94) in Oligodendrocytes
  misc_feature 1..286: note = source = chr18:77113101-77113386; Gene: ATP9B (intron)
  source 1..286: mol_type = genomic DNA
cggaggccaggccgaaaggccaagtggcgttttggcaggcgggcagcagggtggcactgctggcgagagtgcagatggtccagccactccagaaagcaggctggcagtttttatgaaattaaaaatttgctgccccatgccccagcaacctccctcctcagtgttcacccaggaaaaaggaaaacactcatgcttccacgcaaaccgacacagggactctcaccgcttcagctgtgatctccacagactgggagcttccacgcagaccagcagcaggactctcacc

SEQ ID NO: 5633 - DNA, 418 bp, Homo sapiens
  misc_feature 1..418: note = U/M: U (0.13:0.95) in Oligodendrocytes
  misc_feature 1..418: note = source = chr7:638594-639011; Gene: PRKAR1B (intron)
  source 1..418: mol_type = genomic DNA
cgggacggccgcacctcccagctttctgggattctgtctcaaagcggggatccgtggctgctgccgctgcaggcaggacccagggaagctggaccaggacgcgctgcccatgaggcctggagaagcccaaggcctccgagagctccctccgcagcctcagaggaagccattgtgcgggtcccacagacggccagggccacactgtgctcggccgcccggaggacaaaggggccatccttctcaggacactggccactgtcaccactcccggcgcagtgcgggccccaccccagctggtacgcaaaggggctacttcttgttgtgtttcatttttttgttttctctcttttttttttttgagatggagtttcgctcttgttcctcaggctggagtgcaatggtgcgatctcggctcacc

SEQ ID NO: 5634 - DNA, 76 bp, Homo sapiens
  misc_feature 1..76: note = U/M: U (0.11:0.92) in Oligodendrocytes
  misc_feature 1..76: note = source = chr15:45068518-45068593; Gene: TRIM69 (Intergenic)
  source 1..76: mol_type = genomic DNA
cgctgatttttttttttttttttttgagaccgagtctcgctctgtcgcccatgttggagtgcagtggcgcgatctc

SEQ ID NO: 5635 - DNA, 452 bp, Homo sapiens
  misc_feature 1..452: note = U/M: U (0.1:0.91) in Oligodendrocytes
  misc_feature 1..452: note = source = chr1:2006859-2007310; Gene: PRKCZ (intron)
  source 1..452: mol_type = genomic DNA
cggctgccccccagaagctgtttcgtgttgatgctgccggggccggctgtggtacctgtgtctgtgtctcggccagatcggcacacatcttccgcgttcctgtcccagctgcatcagccatcagtgggggcccttctccgaccgtcttcctagacttcagagccactggtggttatgtaaggagttgtgtgttcctctgcccaactccgagcttggtcccacctcccagactcacctctgggctccgggctctgctgcgatgtttccgaggctcccagttaatcagatctgtcagcccagtgtccacagggtgcctgagagcccagcccatccacactgggtgccccagaccttccacggggtctggtggggacctgccagggctgtcaatggccccagtggagaggcccactgagcatcctgagaagttcccgtgcttgtgacctgctctc

SEQ ID NO: 5636 - DNA, 449 bp, Homo sapiens
  misc_feature 1..449: note = U/M: U (0.13:0.93) in Oligodendrocytes
  misc_feature 1..449: note = source = chr17:11973045-11973493; Gene: MAP2K4 (intron)
  source 1..449: mol_type = genomic DNA
cgagtttactgtggaaatttccggaattaacagagctgcattgcagaaggatgcataaagcagtattcatctagagatcgtaacagtacggacacagaagaacagttgcagtgatgtgcagggtatgtcttacctttattttcctgtctaaggaagattagtcatatatatatatatatatatatatatatatatatatatatatatatatatatatatatatatgcatgctgaggagacagtaaaacagcttggggcgttttagtatatgctggcttgatacagtcaaagttgcttaggaaaaagaaggaagaaatgatttgggaaagaaggtatatttgatagcattgggaagaaatcaagatcagatgatcgaggtagaagaatgtgatagtgaaataagaggagaaaacatacttcaaactaattaaataataaaaggttcttac

SEQ ID NO: 5637 - DNA, 466 bp, Homo sapiens
  misc_feature 1..466: note = U/M: U (0.12:0.92) in Oligodendrocytes
  misc_feature 1..466: note = source = chr1:243633926-243634391; Gene: SDCCAG8 (intron)
  source 1..466: mol_type = genomic DNA
cggtgccgactcattagcatacagccgtgctgtgcttgctaacaaagcaggctctgggtatctgctagtttctcagcttgtctgtcttccttgaccgaaaagaagagaagaaatagattcaggcaagggtgctgtccccctcctgtggcaagacagcatcacaaggattcccagagagagcgagctttgaagtgattttaaagtcaccatccttgggagaaaggagactgtccaccctttgtttttctcatcttcttctatagcatcaacaagcaaaagaaaaatcgctatgttctctagttaaaaatgatcgagccctgaatacttcctggtcatctctttcatagttgttgttgttagagtgcataagaagaaatatctgtataggcagaggtacacaagcatgctctcccctcagtctgtctctcgatccctcttttgttgggggatggagggaagaagaaac

SEQ ID NO: 5638 - DNA, 411 bp, Homo sapiens
  misc_feature 1..411: note = U/M: U (0.14:0.93) in Oligodendrocytes
  misc_feature 1..411: note = source = chr18:74710903-74711313; Gene: MBP (intron)
  source 1..411: mol_type = genomic DNA
cggattttaagagcagtgttttggggggtttaagagcagtgttttgggggtttaagagcagtgttttgggggtttaagagcagtgttttggggggtttttcaatttatggggagtgggcacttatcattctgtcacaccttatgataaacaggttacctgttcctaggtgggaggagctgggagaagatgctaggccttaaagaaacaacgggaggaggtgaggggaggacgcaagctgggtggggcacttagggggtgaaggtgaactcaagtcacttcacagaccagccatgggggacgctgaagcgggtggcgcaccctcaagccttcccggaggagaccgctgagggcctgggccagcctcgcaacctccgcttcccccgtcaaccccatcagaagctctgagctgc

SEQ ID NO: 5639 - DNA, 220 bp, Homo sapiens
  misc_feature 1..220: note = U/M: U (0.12:0.9) in Oligodendrocytes
  misc_feature 1..220: note = source = chr6:137027578-137027797; Gene: MAP3K5 (intron)
  source 1..220: mol_type = genomic DNA
cggagagacgatctagaaaagcctgttgtatcaaggcttcactgaggttggggaatcatcatttagaaaagggaaaagggaacagcatattggaaaggatggcatgaatgttgccatggaaacagaaatagtaaggcatttgtggagcctcaagggcgagtccatctggctgaggcaaggagccagatctgggagggaagagtgtggccaggcgaggccc

SEQ ID NO: 5640 - DNA, 270 bp, Homo sapiens
  misc_feature 1..270: note = U/M: U (0.15:0.91) in Oligodendrocytes
  misc_feature 1..270: note = source = chr8:140889295-140889564; Gene: TRAPPC9 (intron)
  source 1..270: mol_type = genomic DNA
cggtgggatttgcttggtgattagttggagaatgtgtactgaaaatatccactccataatgtggataaaacctaatctgtattcactggatgtctatgaaagacagcacagaccaatcattgatgcatctgagaaaatacaaagagctataaagaggaaagtgttagcagtggaagaggcaggcggagggtggcacagtcgtgggacactcaaatccgcatggcaaatgcctagccccattagtcaccatgaccgggtctctatggaaac

SEQ ID NO: 5641 - DNA, 463 bp, Homo sapiens
  misc_feature 1..463: note = U/M: U (0.17:0.93) in Oligodendrocytes
  misc_feature 1..463: note = source = chr18:74713115-74713577; Gene: MBP (intron)
  source 1..463: mol_type = genomic DNA
cgcccacccggttcccactcatagggtccccgctcactgtcccggaccctgaagctcatctcagcctccaggtgggaccatgcagggctggggcttgggggttcctcgcctgccatcccaggctggggtgtgcccgcgtttctcttccagaggagagtaaatcactagatacacgggtgtagatacacctacccagaagatcggcccagcgtagcctgacagtctccagccactccgcagcagtccacggcagctaatgagcctgccagggtacccacgctgcagttttaacagatgggcgaggtattggaggtctctactcctatttcacatggaatccttttggagacacaaggagaagtgtgcattcctagaacttggatgacttacttaagaaaatgcccgtaagaggccaggcacggtggctcacacctgtaatcccagaactttgggaggccaaggc

SEQ ID NO: 5642 - DNA, 384 bp, Homo sapiens
  misc_feature 1..384: note = U/M: U (0.17:0.91) in Oligodendrocytes
  misc_feature 1..384: note = source = chr8:26445968-26446351; Gene: DPYSL2 (intron)
  source 1..384: mol_type = genomic DNA
cggatctgcacactctggatctccagggcttgggaaccactgctctgaatgtcatttctgctcacctgaactccaggctctctctagaggaggtgcaccctcaggcacaacatacccagcaggcttcctggtccctgggtagcaccgcacagcagagatggggactggactctagcagggaggaggaggggaggtgctgctgccgcagggctggaaggggccctccctcctgagtaccagccttgtcacttctcccctggctgtggctccctggatgtgcatcaggcacctccatccaactgtccccagttggactccctgtctgctccttgctgcttttccggtgcccagtcctggagagggctcgctggaggttgtgctggc

SEQ ID NO: 5643 - DNA, 227 bp, Homo sapiens
  misc_feature 1..227: note = U/M: U (0.19:0.9) in Oligodendrocytes
  misc_feature 1..227: note = source = chr1:155842984-155843210; Gene: SYT11 (intron)
  source 1..227: mol_type = genomic DNA
cgaggcaggcggatcacaaggtcaaaagattgagaccatcctggccaacatggtgaaaccccgtttctactaaaaatacaaaaattagctgggcgtggtggcacgtgcctgtagtcccagctactcaggaggctgaggcaggagaattgcttgaacccgggagacagaggttgcagtgagccaagatcacgccactgcactccagcctggcgacagagcaagactcc

SEQ ID NO: 5644 - DNA, 498 bp, Homo sapiens
  misc_feature 1..498: note = U/M: U (0.18:0.89) in Oligodendrocytes
  misc_feature 1..498: note = source = chr15:43811799-43812296; Gene: MAP1A (intron)
  source 1..498: mol_type = genomic DNA
cgggtgcaggggatggcagcattcttcttcagcatcttctgtctcatttgccactttctttctttgctgaattgtttggtgtttcatgtgaggctggagaagggaaataggggatttggggatgccttatctttctccatggcctggggaacaccctgaatctctccttccttattaatgtgtttcttgttcaagaacctttcactccccatgcccgtggtagaggcccctaggagcggggcaaagatgagagaagaaactgttcacaatgaataggttgtggggtagtgaatctggcctctctgaaactttgggacatgaagatcaggttggagagggtgttgtgaaaacttccgagcaggaacaatatgattgtgtgcatgtgtattagtgcgggcttggcctctgaggaaccagaggacagaaaatgaagttatagtcctatgtccattctttgaatcataaaaccccaaaaatttagatagcacaggcttctcc

SEQ ID NO: 5645 - DNA, 180 bp, Homo sapiens
  misc_feature 1..180: note = U/M: U (0.2:0.9) in Oligodendrocytes
  misc_feature 1..180: note = source = chr13:25743968-25744147; Gene: AMER2 (exon)
  source 1..180: mol_type = genomic DNA
cgcagtggacaggtgatggtgcctggagatacgggctttaaccgggacagggaggacgtctcctcgttgtccttccctccaggaagggttgctggacttccgtccgggtcagcatagagatcatagagcgcgtccccgctgtagctatcccgggggatgcccgccttcttcccgctgctc

SEQ ID NO: 5646 - DNA, 441 bp, Homo sapiens
  misc_feature 1..441: note = U/M: U (0.26:0.93) in Oligodendrocytes
  misc_feature 1..441: note = source = chr8:26454586-26455026; Gene: DPYSL2 (intron)
  source 1..441: mol_type = genomic DNA
cgtctcctactaagtgggaggctgcacccagcatggaagatgctcaccaagacggtggtatattgggtgtctcttctctcctacagaagccctgggttgatgccctagatctccccttgcatcccagagggggatttggagagcaatcaagaggagtaactgatgccatgcattcatcaactgaacttaatccttcttctgggaggcccgggagccttcttccatgcggggccagattgagctgatttctgtcacgtaggctgctccgaggttgccttgcccttgcctggcactcatcttttgcatttctctgaatcgctttggcgtgggcttttatgaggttcattaggctcagcacctcccatgtctgcttgggaaacaccacgggcagatggcatttttcttttcttttctttttttttggatacagagtctccctcc

SEQ ID NO: 5647 - DNA, 361 bp, Homo sapiens
  misc_feature 1..361: note = U/M: U (0.28:0.93) in Oligodendrocytes
  misc_feature 1..361: note = source = chr6:161677637-161677997; Gene: AGPAT4 (intron)
  source 1..361: mol_type = genomic DNA
cggagctgacacgtcctccctgaagcaggctcgggaggcagagatggcgtctgatggctcccccggtccctgcagcctgtacacagtcgacactgacaaagagcgttcccgaaagaaatctggtggattgccaaaagcttcattaattaatgaaatcagtggggagataaataattgaagggaaagaaatgggttcatcagtttggcaacactgaaattttcatgcattctgcctaggagacgaataagcccacaagacaggcatcaagaatggatgtgccttttctccagttttaggtctgggagagtttccactttcccaaaagtcagcctttggcatcacgttggagacgcctgttgc

SEQ ID NO: 5648 - DNA, 471 bp, Homo sapiens
  misc_feature 1..471: note = U/M: U (0.22:0.86) in Oligodendrocytes
  misc_feature 1..471: note = source = chr4:153153323-153153793; Gene: MIR3140 (Intergenic)
  source 1..471: mol_type = genomic DNA
cgtgctcatcatttgaagtctgtatagagctcaagcaacgacagtcgacctcactaaaaagatgatttccagtagccaagtagatgattggtgaagtaattatgttatttagggcccttctccagtgctgaaagatgaatcacatttgcataggtaaaaacaaagactcaaatgggagaaaataaaccaaagttgttttgcagaaacaaagaaaaataatgctcagtggtgtctctttcggaaacattttccttctgctgccaatctatgcaggctggaacccaaatcctcagtggagcattgagtatgaaatctgggcatgtctctgaggttccaggtccccacagagtagctgcagcatcattgtaacactcagtgacagaagctaagttttaaaagacaataaattgtacatctgtgatcatagcagcattattcacactagccaaaacatggaagcaacccaagtac

SEQ ID NO: 5649 - DNA, 388 bp, Homo sapiens
  misc_feature 1..388: note = U/M: U (0.28:0.91) in Oligodendrocytes
  misc_feature 1..388: note = source = chr8:26438745-26439132; Gene: DPYSL2 (intron)
  source 1..388: mol_type = genomic DNA
cgtgacagcagactttttggtcaattgtgcttgcttgacacagtctttccaagacatggctttcctatatgtaggtggttttttttgttgttgtttgtttgtttttaaattgaggtttagccaaaagccattttaaaaagtactatcttctttttttttttttgagttggagtcttgctgtgtaacccaggctggggtgcagtgacgtgatctcggttcactacaacctccgcctgctgcttcaagcaattctcctgcctcagcctcccgagtagctgggattacaggcgcccaccaccatgcccagcccattttttgtattttttatagagatggggtttcaccatgttggccaggctggtctcaaactcctgacctcaggtgatcc

SEQ ID NO: 5650 - DNA, 183 bp, Homo sapiens
  misc_feature 1..183: note = U/M: U (0.06:0.95) in Oligodendrocytes
  misc_feature 1..183: note = source = chr5:173293925-173294107; Gene: CPEB4 (Intergenic)
  source 1..183: mol_type = genomic DNA
cgagagagaacgtcagtaggatctagcagctggtcgccaccactgttcaggggctgaaggcttgctagaaccaattggactgtgcgtgaagtcttctggctcggaccgacggtttcagggacaagcggcccaggactccgatcccagctcagtcgcaggtaccggcatacagccacttccgcg

SEQ ID NO: 5651 - DNA, 208 bp, Homo sapiens
  misc_feature 1..208: note = U/M: U (0.05:0.93) in Oligodendrocytes
  misc_feature 1..208: note = source = chr9:126391558-126391765; Gene: DENND1A (intron)
  source 1..208: mol_type = genomic DNA
cggcacgcagttagtgcctttccctgtctgtgtaccatgctcccttacggacttctgttgacttgaactgtttggagacaatgtctttaactgcattacactagagaaagaaattattcatgaggaaaagggatccaaatcggtcacaaagacagtctgttttggtaatctattgaagacagatagtgaggacgatgatgtgtctgcg

SEQ ID NO: 5652 - DNA, 57 bp, Homo sapiens
  misc_feature 1..57: note = U/M: U (0.08:0.95) in Oligodendrocytes
  misc_feature 1..57: note = source = chr3:93611888-93611944; Gene: PROS1 (intron)
  source 1..57: mol_type = genomic DNA
cgctgagtgatcgatagattctgcgtacagtatcacgccttctgaatcatatgtccg

SEQ ID NO: 5653 - DNA, 76 bp, Homo sapiens
  misc_feature 1..76: note = U/M: U (0.07:0.94) in Oligodendrocytes
  misc_feature 1..76: note = source = chr15:23066819-23066894; Gene: NIPA1 (intron)
  source 1..76: mol_type = genomic DNA
cggaaatgtccttaaaatacagctttaggccgggcgcggtggctcacgcctgtaatcccggcactttgggaggccg

SEQ ID NO: 5654 - DNA, 150 bp, Homo sapiens
  misc_feature 1..150: note = U/M: U (0.03:0.9) in Oligodendrocytes
  misc_feature 1..150: note = source = chr21:38223581-38223730; Gene: HLCS (intron)
  source 1..150: mol_type = genomic DNA
cgtccatcaacagatgactggacaaagaaaacgtgctgcagatacacaatggagcactatccagccacaaaaaagaatgcgatattgtcatttgcaacaacatggacggaactggaggtcattatgctcagtgaaataagccagacatcg

SEQ ID NO: 5655 - DNA, 176 bp, Homo sapiens
  misc_feature 1..176: note = U/M: U (0.05:0.92) in Oligodendrocytes
  misc_feature 1..176: note = source = chr4:154011119-154011294; Gene: TRIM2 (Intergenic)
  source 1..176: mol_type = genomic DNA
cgcaggcatacaattaacgccgcagagcagccttgcctgcgatctgaatgcatccctttcctcttttggaactgaaaccacacaatgaggcatttcagtcacaacaaatgggtgacagaggcataataggcctggctttaaagttatcttaaaacagcttctgtatttcggcttcg

SEQ ID NO: 5656 - DNA, 207 bp, Homo sapiens
  misc_feature 1..207: note = U/M: U (0.06:0.93) in Oligodendrocytes
  misc_feature 1..207: note = source = chr3:139090370-139090576; Gene: COPB2 (intron)
  source 1..207: mol_type = genomic DNA
cgcagaacaaagaaagcactaagacggctcatgctatacactcgcctctgactctcatcttccaatggacagctctggtgagaactgttttttaacacggagaatcacagcccacatcaagccttgagagtcttcaagcagcacacaacacatctgcaatcagggcatgctggctatcatacaatcaaaacttactctgaagaatcg

SEQ ID NO: 5657 - DNA, 209 bp, Homo sapiens
  misc_feature 1..209: note = U/M: U (0.05:0.92) in Oligodendrocytes
  misc_feature 1..209: note = source = chr9:731582-731790; Gene: KANK1 (intron)
  source 1..209: mol_type = genomic DNA
cgagaactcacaattgagcagaaaaagactgagagcatcactctctgggccaacgatcgtcatcttttccttcaaaatgggtccttttgcttagctctccatgtttacgacccaaattgtagggcctttcacaattgataaccacatcaccagtttgctttctaaatagaatggttattgtttgttccttctctttgcattggcccacg

SEQ ID NO: 5658 - DNA, 155 bp, Homo sapiens
  misc_feature 1..155: note = U/M: U (0.07:0.93) in Oligodendrocytes
  misc_feature 1..155: note = source = chr1:25580876-25581030; Gene: C1orf63 (Intergenic)
  source 1..155: mol_type = genomic DNA
cgatgactctgtccaattacagccaccatatagagatgttatgaataggtttttgttttgttttgttttgagacagagtctcactctgtcgccccggctggagtgcggtggtgtggtctcagctcactgcaacttccacctccccagttcaagcg

SEQ ID NO: 5659 - DNA, 155 bp, Homo sapiens
  misc_feature 1..155: note = U/M: U (0.08:0.94) in Oligodendrocytes
  misc_feature 1..155: note = source = chr7:66045861-66046015; Gene: LOC493754 (Intergenic)
  source 1..155: mol_type = genomic DNA
cggaataaattgagattctagaaataaacccacaattcttctgtcaactgattttccacaaaagtaccaagaccattcaatggcgaaaaaagagtcttttcagccgggcgcagtggctcgcgcctgtaatctcagcactttgggagaccgaggcg

SEQ ID NO: 5660 - DNA, 306 bp, Homo sapiens
  misc_feature 1..306: note = U/M: U (0.06:0.92) in Oligodendrocytes
  misc_feature 1..306: note = source = chr1:32793778-32794083; Gene: HDAC1 (intron)
  source 1..306: mol_type = genomic DNA
cgttgaactgttccatctgcttctattagcatgaatgtggtgaaatcagctgctttgccatgcctggtagcccttgggtaaaaaagtggcactaattcagttgtttgccatggcaagcgttagaataaatgagcattcactttttttttttttttgagacagtctctctctgtcacccagcctggagtgcagtggcgtgatctcggttcactgcagcctccgcctcccgcctccaggcgatcttgtgcctcagcctccgaatagccgggatttagctgggattataagtgcgtgcaactatgcccg

SEQ ID NO: 5661 - DNA, 395 bp, Homo sapiens
  misc_feature 1..395: note = U/M: U (0.09:0.95) in Oligodendrocytes
  misc_feature 1..395: note = source = chr11:6421632-6422026; Gene: APBB1 (TTS)
  source 1..395: mol_type = genomic DNA
cgtggtggcgggagcctgtaatcccagctattcaggaggctaaggcaggagaattgcttgaacccaggaggcggaggttgcagtgagctaagatcacgccaccgcactccagcctggcggacagagcgagacttgtctttaaaaaaaaaaaaaaaaaaattctttgcaacaatgaagtatgtgacaattatgctcactgtttccttctccagatgctcccagcccacagctggtgctgtaacactaaacccagctacaggctgctgtctggtgtcctccagtcatctaacatcagcctcccaatcccaccaaagcttttccatgggatgaaggagtggggtctccctttgtgcctggttcagcaccactcacgtggctgatgctcagcgaaggcg

SEQ ID NO: 5662 - DNA, 400 bp, Homo sapiens
  misc_feature 1..400: note = U/M: U (0.06:0.92) in Oligodendrocytes
  misc_feature 1..400: note = source = chr10:115069451-115069850; Gene: HABP2 (Intergenic)
  source 1..400: mol_type = genomic DNA
cgctcagggagttggacctccagcactttccccgctttgctgtgtaacccgcatctgcacaccaagtgcggcagaccagtgggcccctgggggctgggggcttttcttctttctcccttgttcctgttcattttggagccgtaagagagccatggagagaaagaactgagaaaatcaagggctgagagactgttgtgaaaagagtccgtggagacaatacagtgagtgcttagtgaggtcctgaatgcagggcttatggggctgtgctgagccctcaaataggccttttgtgctcctttctattgactgttactaaacccttcaatgggctcccattgtgcttggaataaaatccaaactccccacccaggcccacagcgctccagcctcatcttatacg

SEQ ID NO: 5663 - DNA, 181 bp, Homo sapiens
  misc_feature 1..181: note = U/M: U (0.02:0.87) in Oligodendrocytes
  misc_feature 1..181: note = source = chr10:31070570-31070750; Gene: LYZL2 (Intergenic)
  source 1..181: mol_type = genomic DNA
cgcctgcaggatccggagtgcctcggcgccatcctccctggaagaaagctcccttgttccaggcacacaaaggatgtgcgctgggcaggcgacaggccatgaatgctaatggcccaggcgcttgcaggctccagctctgcctggcgggaaagccagcctggtgcctctgccactcttcacg

SEQ ID NO: 5664 - DNA, 203 bp, Homo sapiens
  misc_feature 1..203: note = U/M: U (0.05:0.9) in Oligodendrocytes
  misc_feature 1..203: note = source = chr9:117110058-117110260; Gene: AKNA (exon)
  source 1..203: mol_type = genomic DNA
cgggcggggcggtcaaaggcagatgctgggcgtgtcgggctgccctggagtggctggtgcaggctgtcttccagccgcagacgaagccgggacacctcttcttgcagctcacagatggcctggctggggttggagtggagacagaaacaaagaacagaggcatgaggaacagagctgcagccacccgagtatgccaggatgcg

SEQ ID NO: 5665 - DNA, 207 bp, Homo sapiens
  misc_feature 1..207: note = U/M: U (0.06:0.91) in Oligodendrocytes
  misc_feature 1..207: note = source = chr3:85626381-85626587; Gene: CADM2 (intron)
  source 1..207: mol_type = genomic DNA
cgtgtcccccggagttcatgtgttggaagcttaatccccaatataacggggttgaaaatggggcctataggaggagattgggttagaagggctctaccctcatgaatgaatgaatgctgttatcatgagagtgagttagttctagagagagtaggcttattataaaagcaagttaggccctctcctgccccgttgctctctcgcacg

SEQ ID NO: 5666 - DNA, 237 bp, Homo sapiens
  misc_feature 1..237: note = U/M: U (0.07:0.92) in Oligodendrocytes
  misc_feature 1..237: note = source = chr7:3950043-3950279; Gene: SDK1 (intron)
  source 1..237: mol_type = genomic DNA
cggaatatttcctgaagaggccagatttctgtgtgtgtatgtgtgtgccgggcatctgtgtccttagcattttggaaggtgcctgagctttcggaggtcaccaaaaagtactgagtcatcgtgccattcggttaccttcggcgctaccatcctagtctgaagcttttacaggcctctaagaaggtcttcctgagaccccagtcttgttttttgcataagtacgctgcccaggctccg

SEQ ID NO: 5667 - DNA, 343 bp, Homo sapiens
  misc_feature 1..343: note = U/M: U (0.05:0.9) in Oligodendrocytes
  misc_feature 1..343: note = source = chr18:44614183-44614525; Gene: KATNAL2 (intron)
  source 1..343: mol_type = genomic DNA
cgttgtcctgtagatacaagtgatatttgttctatggcctgttttttttccttcatttaatctattgtggacaactttgaaaatctgcctaatcccacataaaactccattgtatgtgtgtaccataatttatttgacttttctttttcttgagcgtttttaatctggtgccagcctgttgaacaccttttcccactaccatgactcagtgccctgctgggctccacggacactctaaggtcggggggcagttcttcgttcagtgtttagctggaatagggcaggtattattaaaaggttttttattctggtagaccgcctctcctcagtcctttggctagcg

SEQ ID NO: 5668 - DNA, 393 bp, Homo sapiens
  misc_feature 1..393: note = U/M: U (0.09:0.94) in Oligodendrocytes
  misc_feature 1..393: note = source = chr8:29039468-29039860; Gene: KIF13B (intron)
  source 1..393: mol_type = genomic DNA
cgtcgacataaggtcccaacacactatgctctctgactttcaacgtctgacggcttctgttcatgaaaaacaaagaaatgattttttaacaatagcctatttttaaaaaggactcagctctgctccataaaaatatacaatgaatccaagaaagaccccaaataagtaaaaccaactgacttgatcccagaagaatttaaaccaaactttaaaatcttcactgcgaagaaaacttcataatgtgattaaatatcacatcactcaaaagggtatattgtgggatgcctatttacttactacaaagaatgcagagtcaaataaatatgaacaatctatttgtcttacagagaatgtggtacaaagagcagaaactcagtaaatgttaactgtgcg

SEQ ID NO: 5669 - DNA, 500 bp, Homo sapiens
  misc_feature 1..500: note = U/M: U (0.1:0.95) in Oligodendrocytes
  misc_feature 1..500: note = source = chr2:111407869-111408368; Gene: BUB1 (exon)
  source 1..500: mol_type = genomic DNA
cgtagtaggctgtcaaattctaattccctcttccaacagtagttattttgataccttctaaaattaaaattgatttgcccttcaagtatgctactgttactccattgtgatgcattatgcaagtttcatctgaactcactgacatctgttctactcagtgacattcaagtcccactgtgggtttctttcatgggacagctttccccatgctcctgtcctgattcaagggcataacaaagagtgagtgttcgtacttggagcatcaacagtcccaagtgaactcatctgcatccattctgcttggagcccagcaatagcatctggtggatcttctgcaatggcagcgtcagtgtctgtgagtctgcaagcctcaacgcccaactctgcctcacaggtaagtaccccacctgcagcaggctggctcagacgaagtaaggatgctgaatacatgtgagacgacaaggcctgttttgggcttttctcttgaattggactggacg

SEQ ID NO: 5670 - DNA, 155 bp, Homo sapiens
  misc_feature 1..155: note = U/M: U (0.07:0.91) in Oligodendrocytes
  misc_feature 1..155: note = source = chr8:99034900-99035054; Gene: MATN2 (intron)
  source 1..155: mol_type = genomic DNA
cgaggacaaagaagctttctaccagggaagctgcatgcctaattagttcagagcataagcttcagctcagacagatctggatttgaaccctgattcatactacccgtgtgaccttggtcaaattatttaatctcggccgggcgctatggctaacg

SEQ ID NO: 5671 - DNA, 188 bp, Homo sapiens
  misc_feature 1..188: note = U/M: U (0.07:0.91) in Oligodendrocytes
  misc_feature 1..188: note = source = chr6:112683322-112683509; Gene: RFPL4B (Intergenic)
  source 1..188: mol_type = genomic DNA
cgatctctgtctccagctgcagccaagtgacattggtgtcatcagtgactttgcggagcccatggatatcgctctccacagactggcacatggtcagctctgtctcatacttgactctgaagtcatcagcagcaagacaggcattgtctgtctgcagaacgatgcgggcattgtccacagtatttgcg

SEQ ID NO: 5672 - DNA, 255 bp, Homo sapiens
  misc_feature 1..255: note = U/M: U (0.07:0.91) in Oligodendrocytes
  misc_feature 1..255: note = source = chr1:25981415-25981669; Gene: MAN1C1 (intron)
  source 1..255: mol_type = genomic DNA
cgtgagccaccgtgtcgggcctaggctgtaaattttccatggttccaaagtgctgtagagttcactggaacacatgctgtcctctgataattgaagtggcttaaaacaaaacaagtctttattggtttgaaacaaaccatcatgtgtgcttgtgcttttttaaaacaaaagcaaagctgacaccatatctccaattgagagcttcagcctccttcacccccagagatccggactaagtaaggaatttatttaccg

SEQ ID NO: 5673 - DNA, 278 bp, Homo sapiens
  misc_feature 1..278: note = U/M: U (0.1:0.94) in Oligodendrocytes
  misc_feature 1..278: note = source = chr21:34050957-34051234; Gene: SYNJ1 (intron)
  source 1..278: mol_type = genomic DNA
cgcaaacttccagtagttaaaagtgctcgagctttgtcagctaaatcactattcagagtatttcccagtagcaaaacatcaatggcctcttgcttggagctgtcaaagaagttattctgaattgttcgggtaacagagcgagcaccatcttttaactttccagcctgttaagaaaggagcgcagattttcattttaaatattactgattttactcattaggttttttgaaattttaaatcagttttatatgattttagtataaaaaaggacctaatcg

SEQ ID NO: 5674 - DNA, 382 bp, Homo sapiens
  misc_feature 1..382: note = U/M: U (0.1:0.94) in Oligodendrocytes
  misc_feature 1..382: note = source = chr19:12771697-12772078; Gene: MAN2B1,MAN2B1 (intron,exon)
  source 1..382: mol_type = genomic DNA
cgagtagctgggattacaggcacgcaccatcacacccagctaatttctgtatttttagtagagacagcgtttcaccatgttggtcaggctggtctcgaattcctgacctcgtgatctgcccggctcagcctcccaacatgctgggattacaggcatgagccattgcgcccggcctcatgctggacttcttacctacagaactgtaagacaatgtatttctgttgttttgagctgctaagtgtgtggtcatttgttatagaatgaccacaatagaacaatagaaaacaaagacagcactgagagctatgcacataacccaaggcccccggatgcaagcgcacatgtgcacaagggtaccacagggtaggcgcactgacctgcg

SEQ ID NO: 5675 - DNA, 477 bp, Homo sapiens
  misc_feature 1..477: note = U/M: U (0.08:0.92) in Oligodendrocytes
  misc_feature 1..477: note = source = chr8:140846549-140847025; Gene: TRAPPC9 (intron)
  source 1..477: mol_type = genomic DNA
cgcaactccatagctgcaaatggagatccagggaaggctccacggaccatagagggctgtgtcgggagcagtgagtctgacattcctaatgacctaggacaatgacgtgtgtgttcaccacgtgacatgcacaactgagagacagagctggctttctgaggaaggggggcgggcacagctgcaaggcacgggggacccctccaccgccagcaggcaggcggaacgtggcgtctggcgaatggcagggaagccgccctccatgacgctgagtcctcaggaccagtgcactagtggggacgttgtcgccccatctcacagctgagggagttgaagccagagagtgtggcttatccatggtctaccaggagtacaggcagagtagcctgaacttggagtcctgcctggcaggctgcaaagctcttggtatttccatccctccttgccatgtccaagttcacgagagggatctcacacccg

SEQ ID NO: 5676 - DNA, 87 bp, Homo sapiens
  misc_feature 1..87: note = U/M: U (0.1:0.93) in Oligodendrocytes
  misc_feature 1..87: note = source = chr11:34200124-34200210; Gene: ABTB2 (intron)
  source 1..87: mol_type = genomic DNA
cgcttgttgcgtttcccgtaggctgagcttggtcgttccgtgcccgaatgcagatatctgcagggccagagccaggagaccgggtcg

SEQ ID NO: 5677 - DNA, 110 bp, Homo sapiens
  misc_feature 1..110: note = U/M: U (0.09:0.92) in Oligodendrocytes
  misc_feature 1..110: note = source = chr7:47852597-47852706; Gene: PKD1L1 (intron)
  source 1..110: mol_type = genomic DNA
cgctgacctcgcaggcctgtcaggaggctgcacctgctgcagatgcgctgcgtccagcaggcaccagagctggagtggcggtggcaggcaggatgagccccggcccttcg

SEQ ID NO: 5678 - DNA, 246 bp, Homo sapiens
  misc_feature 1..246: note = U/M: U (0.05:0.88) in Oligodendrocytes
  misc_feature 1..246: note = source = chr7:45722501-45722746; Gene: ADCY1 (intron)
  source 1..246: mol_type = genomic DNA
cgcacagaggggagtgtagcaccatcagagacagcccgagggcttcattctagcccctgtgagtgcagacggtcaggaaatggtgcctgctttttctccctctcatcctcagttgacatcatctcccgaagtgccacaatggccactttgttcatgagcccattgggatgacaggagtggccgaggaaatagaatgactggtgtccacagtaggggttgtcctatccactggatttgaattctccg

SEQ ID NO: 5679 - DNA, 268 bp, Homo sapiens
  misc_feature 1..268: note = U/M: U (0.06:0.89) in Oligodendrocytes
  misc_feature 1..268: note = source = chr2:241279723-241279990; Gene: GPC1 (Intergenic)
  source 1..268: mol_type = genomic DNA
cgggataagagagcgctacatctgccgcttcctgcccgaggcctccagcaacaggcgcggtggggctgggacatgggtgctggctctggaggcccagaggagccgctcatgcccatggctgggtccggctgtcaggacaggcctgtcttggtggcatacagcctggaaccaggagggaggaggctgtctgcccctacagcaagggccaaacccacagggctgggtccccactgcatgcactacccacttccacgagcccggggtgccg

SEQ ID NO: 5680 - DNA, 305 bp, Homo sapiens
  misc_feature 1..305: note = U/M: U (0.04:0.87) in Oligodendrocytes
  misc_feature 1..305: note = source = chr16:19884310-19884614; Gene: GPRC5B (intron)
  source 1..305: mol_type = genomic DNA
cgtgctcctttcctcaggcacggaggttttgggacccatctgtacccttggctgggtgcagtgaagaaccgtgaatcatcatcactggtggctgaaggacagggtaggagggaggccaacttctctgtatacccttttgtattctttgaattggatactctgtgccacatctgacctcttgaaaaataagaggaaggctgggcgtggtggctcatgcttgtaatcccagcagtttgggaggcagaggcgggcggatcacgaggtcaggagttcaagaccagcctggccaacacagtaaaacaccg

SEQ ID NO: 5681 - DNA, 328 bp, Homo sapiens
  misc_feature 1..328: note = U/M: U (0.08:0.91) in Oligodendrocytes
  misc_feature 1..328: note = source = chr5:156882998-156883325; Gene: NIPAL4 (Intergenic)
  source 1..328: mol_type = genomic DNA
cggggtgcaggggtgtgtgtgccgctggcatccagagggtagaggccaggggtgctgctaaacattctacgagcacaggacagcctccagcaacaaagaacgatctagtccaaaatgctaactgagcctgttttctacttatagcacatcacgattcagattagcggctcatcaagttctcaaaagccacatgcagctggtagctgccatattggacggcacagctctgtaacctaaaacatctggacatgcacttggaaaagtcaagtttttaaaaacttgggttttggtgaatttgttttcctactcatcccagaataactgaccg

SEQ ID NO: 5682 - DNA, 363 bp, Homo sapiens
  misc_feature 1..363: note = U/M: U (0.04:0.87) in Oligodendrocytes
  misc_feature 1..363: note = source = chr13:25766851-25767213; Gene: AMER2 (Intergenic)
  source 1..363: mol_type = genomic DNA
cgctgctgtctcttgcccgggccattggataaagctcaacaggacagacatgccggagaaagcaaattttatcccaagacaaacactacagtctctcttcagagaagcctttgaaggtggaaaacattatggtggatggaactggaggttttcatgacctgtgaagaaatgctgggaaactggaagaatagagagacaaacagctcctctttccttttgtctttattttgatatttgttcttgaacagtcccttgtttattatcctgtggtgtgtattctgtccccatgatgatgcctaccgcagagccaaaatgtgaaatgagactcattgtccaccgcagatgtgctgctggaggctggcg

SEQ ID NO: 5683 - DNA, 392 bp, Homo sapiens
  misc_feature 1..392: note = U/M: U (0.12:0.95) in Oligodendrocytes
  misc_feature 1..392: note = source = chr6:110996079-110996470; Gene: CDK19 (intron)
  source 1..392: mol_type = genomic DNA
cgggcgacacagcgagactctgtctcaaaaaaaaaaaaaaaagacaaagcctaatccagaacaaggccctaattctcttcaatgtgtgaaggctgagagaggtggggaagctgcagaagaaaaggctgaagctaacagaggttggttcatgaggcttaaggagagaagtcacctctataacataaaagtgcaaggtgatacagcaagttatccaaaagatctagctaagatcattgatgaagatggctacactaaacaacagatgttcaatgtagacaaaagagaattctattggaaacagattccgtgtaggactttcatagctagagagaagtcaacgcctggtttcaaagcttcaaaggacaggctgactatcttactagggtttaacg

SEQ ID NO: 5684 - DNA, 499 bp, Homo sapiens
  misc_feature 1..499: note = U/M: U (0.1:0.93) in Oligodendrocytes
  misc_feature 1..499: note = source = chr18:74703472-74703970; Gene: MBP (intron)
  source 1..499: mol_type = genomic DNA
cggtgaatgcgcaccaggcaagagggctgattgtgagttctcagaaaagcaaaggaaagggactcgggggagcttgcgagattgattttgtcagttttcccctcgctttctcactgctgctcccagatgctacttgttcagaaatagcctgcatgtaaagagcccacacctcaggcaggaatgaatttctggaggtcagaggagctctggccccaggcatgctggctgcgccccgtcgacacagaacgcagcggaagcaaatcagttaaatgcacggaagtcaattgaagtatttccctccagtctgtcagctctatgcacattgattgggaggaccccttgttgttcagaagacagttttgccaccaaaggcctaactcgccctgaaaagtgcgcttttctgggatttatggtagtgcacggaatggtggaattcagtgggtgacaactgcatgctgcagccacaaaggacaatgtttgcagagtgtgctgcgtttcg

SEQ ID NO: 5685 - DNA, 119 bp, Homo sapiens
  misc_feature 1..119: note = U/M: U (0.12:0.94) in Oligodendrocytes
  misc_feature 1..119: note = source = chr4:124219474-124219592; Gene: SPATA5 (intron)
  source 1..119: mol_type = genomic DNA
cggagagaagcagagacaaaaactctcttcatcgagacggaatcccgatggcatcccaggccctgcttccagctggtccgctgaggcccagccacactgctttctttaagttcagttcg

SEQ ID NO: 5686 - DNA, 126 bp, Homo sapiens
  misc_feature 1..126: note = U/M: U (0.04:0.86) in Oligodendrocytes
  misc_feature 1..126: note = source = chr10:71002953-71003078; Gene: HKDC1 (exon)
  source 1..126: mol_type = genomic DNA
cgtgttacatggaggacatgagcaacattgacctggtggagggcgacgagggcaggatgtgcatcaacacagagtggggggccttcggggacgacggggccctggaggacattcgcactgagttcg

SEQ ID NO: 5687 - DNA, 195 bp, Homo sapiens
  misc_feature 1..195: note = U/M: U (0.06:0.88) in Oligodendrocytes
  misc_feature 1..195: note = source = chr7:61652-61846; Gene: FAM20C (Intergenic)
  source 1..195: mol_type = genomic DNA
cgaaggagccgtccccgagtcctttccactggtcttggaagggaagagtctgtgtctcggcgacagagggtgtctttgtggataaatgaggcctctttgtgcatggcctgcccaacagaggccacaggccggacacatgctgaccttggacaccttccatctctggggtcagggctgggaccagaggagatgccg

SEQ ID NO: 5688 - DNA, 316 bp, Homo sapiens
  misc_feature 1..316: note = U/M: U (0.12:0.94) in Oligodendrocytes
  misc_feature 1..316: note = source = chr12:111930410-111930725; Gene: ATXN2 (intron)
  source 1..316: mol_type = genomic DNA
cgggagacggaggttgcggtgagcaaagactgtgccactgcactccagcctgggcgacagagcgagactctgtctcaaaaacagaaaaaaaaaaaaaagaatgcgtacaaacaaaaccagactacaaagaacagaatacccaactcttcaatgcccagacactgatgaacatccacaagcatcaaggccatctgagaaaacatgacctcaccaaatgaactaaaaataaaggacaccagtgaccaattcccaagtgataagagatatgtgaactttcagacagaattcaagctgaatgctttgagaaagttcaacg

SEQ ID NO: 5689 - DNA, 366 bp, Homo sapiens
  misc_feature 1..366: note = U/M: U (0.08:0.9) in Oligodendrocytes
  misc_feature 1..366: note = source = chr3:54952905-54953270; Gene: LRTM1 (exon)
  source 1..366: mol_type = genomic DNA
cgtctgttagtccccctttaaaaaacaaaagcaaagaacaataacaaagccttgatacaacagagttccaaaatcctctgcctgcaaaaacttaggcagatggaatttatgaagtaccttttttttttttaaatcctggagtcaaagaatttaacaaccatattttatgattttaggattcctaaattggctaaatactaaaaatgccacacactaaattggcaattacttatgaccaagaattcattagaagcccagtaaccttcatgttctctaaatgctcagagaaaacaatgcaaaagctgacaagaaggcacgctgggggccgatggtgagggcacagctgcccactgcattcgtgccacg

SEQ ID NO: 5690 - DNA, 435 bp, Homo sapiens
  misc_feature 1..435: note = U/M: U (0.08:0.9) in Oligodendrocytes
  misc_feature 1..435: note = source = chr18:72201352-72201786; Gene: CNDP1 (promoter-TSS)
  source 1..435: mol_type = genomic DNA
cgaaccttcagagagctgggaaaactctaccctcggcccctgcacagccctaggaagctaatcctcggccgtaacattccatcacaagggcccacagccacagtgtgtgggggcctgtcatgtgagggggctgtcacctgagggggctgtgccgctggctcagctctgcctgctggccggggccctactccctctcagagatgacacacaagtgcccccaaagaagaacccgaggagtcgcaggctgggccaggctgctggcttccagtgacatcacatgactttggggccactgcctcatcccgtatctgcgcgtatgagatgcattgtctcttcctctgcagttgagctgaatgaatacctccgaagccgctttgttctccagatgtgaatagctccactataccagcctcgtcttccttccgggggacaacg

SEQ ID NO: 5691 - DNA, 69 bp, Homo sapiens
  misc_feature 1..69: note = U/M: U (0.11:0.92) in Oligodendrocytes
  misc_feature 1..69: note = source = chr18:5969627-5969695; Gene: L3MBTL4,L3MBTL4 (exon,intron)
  source 1..69: mol_type = genomic DNA
cgcagtccggagggcccaagtcaggggacggaaagtgcagacaccaccagaacccgcgtcttctgatcg

SEQ ID NO: 5692 - DNA, 342 bp, Homo sapiens
  misc_feature 1..342: note = U/M: U (0.11:0.92) in Oligodendrocytes
  misc_feature 1..342: note = source = chr10:114534710-114535051; Gene: VTI1A (intron)
  source 1..342: mol_type = genomic DNA
cgaagcaatgaaataagctttcgacgcctgagaacaatgacgcctgtgtcaccaccagtcaatggctgcctcagtgccttgtccctaatagactctcactgaacgtcggtcagttagctgagtgatattgaggttgggtcttgtgactctgcttaaagaccatttctaacacctccactgccgaatttaaaaactgaaacggcttagcatttagaaagaccttttttcatcaagttacacattctataccagcatggatagagttgggataaagaaaaagttttgtataaaaattcttcaaagtaccactgcagtagcaaataggttccaagagcctcatcg

SEQ ID NO: 5693 - DNA, 408 bp, Homo sapiens
  misc_feature 1..408: note = U/M: U (0.07:0.88) in Oligodendrocytes
  misc_feature 1..408: note = source = chr18:74721088-74721495; Gene: MBP (intron)
  source 1..408: mol_type = genomic DNA
cgctcctagtgtgcaaacggcagccctgctcacggtgacggcagtgccagctctgggcttgtccccttccccttctcctcctggctgtcctcttctttgtgagtgctcctggcacctatgtgctttgagaagccgtggcagccacacaaggagaagaggacaggccacagcgatagcccacttcctatgcagagcccagctgagctcaggtgaggacagagcccagagagaccagacgtcccaaggacactcatcgtttagagctcaattcaacccatgtttagtgagtactaaatgtctgctaggcactagttttcaaagcaaactcgggtatgcacgtggccatagaccaggccagccctcaataccagagccactcccgggcccctccacgcacttcaggcctcg

SEQ ID NO: 5694 - DNA, 418 bp, Homo sapiens
  misc_feature 1..418: note = U/M: U (0.07:0.88) in Oligodendrocytes
  misc_feature 1..418: note = source = chr13:67730620-67731037; Gene: PCDH9 (intron)
  source 1..418: mol_type = genomic DNA
cggagtttggtgggggcagtgggaggagagccctggccgtggagtgccccaactccaggggaaaaccatctcccttctggctcccccatctgctgagagctacttccactcaataaaagcttgcactcattctccaagcccacatgtgatcctattctttcggtacacaaaggcgagaaaccccgggatacagaaagccctctgtccttgagatgaggtagagggtctaattgagctggttaacacaagcctatagatggcacactaagagagcatcctgtaacacacgcccactggggcttcagctgtaaacattcacccctagacactgttgtagggtgggagccccacagcctgccgtctgtatgctcctctagaggtctgagcagtggggcactggagagccacacccacatcg

SEQ ID NO: 5695 - DNA, 426 bp, Homo sapiens
  misc_feature 1..426: note = U/M: U (0.14:0.95) in Oligodendrocytes
  misc_feature 1..426: note = source = chr14:103504564-103504989; Gene: CDC42BPB (intron)
  source 1..426: mol_type = genomic DNA
cgggaggctgaggcaggagaatagcgtgaacctgggaggaggcggagcttgcagtgagccgagatcacaccactgcactccagcctggacaacagagcgagcgagactctgtctcaaaaaaaaaaaaaaaaccaaaacaacttcagcactccttaatagccccaaagcgggcaacccagatgtccatcaggagtggacaaagagagggttgtgaatacagtggacactacacaataaccacaaggaactaagctgcagctatacccaatcatgtggatggatctcagttactcttacttacaattactttttattttttgagacacagtatcactctgttcccaggctggagtgcagcagcatgagctcggcttactgcaaactccacctcctgggttcaagcaatcctcccacctcagcctcccg

SEQ ID NO: 5696 - DNA, 471 bp, Homo sapiens
  misc_feature 1..471: note = U/M: U (0.15:0.96) in Oligodendrocytes
  misc_feature 1..471: note = source = chr1:51417651-51418121; Gene: FAF1 (intron)
  source 1..471: mol_type = genomic DNA
cgtaagtgacttaccagtatgcaacagaaaagtccatatttcaaagaggagctcatatgcaaagtttcaaagacccatggtgataacccaatataagaaaatttggccctctccctctcccctttctacggtctccatctccctcatctcccgtttccacagtctccctctgatgcccagccgaggctggactggactgccgccatctcggctcactgcaacctccctgcctgattctcctgcctcagcctgccgagtgcctgggattgcaggcgcgcgccgccacgcctgactggttttcgtatctttttggtggagacgggttttcgccgtgttggccgggctggtttccagctcctgaccgcgagtgatctgccagcctcggcctcccgaggtgtcaagattgcagacggagtctcgctcactcagtgctcaatgttgcccaggctggagtgcagtggcgtgatctcg

SEQ ID NO: 5697 - DNA, 472 bp, Homo sapiens
  misc_feature 1..472: note = U/M: U (0.12:0.93) in Oligodendrocytes
  misc_feature 1..472: note = source = chr8:41474391-41474862; Gene: AGPAT6 (intron)
  source 1..472: mol_type = genomic DNA
cgatttcaaggctcttcttatatttccaccggaatccagccatgacctgatgtgaggagtgtgtcgctgtgttgagcttctgccttttttctctgtccacacacactgcccagtgtggaatagagaatcagcccgaaacaaagggttctcacactctggtgacatcagaatttctgtccatatcaggctttataaaatacaacgacatgaccagatgcagtggttcacgcctgtaatcccagcactttgggaggctgaggccggtggatcacttgaggccaggagttcgaggcaagcctggccaatatggtgaaaccccgtctctactaaaaatacaaaaaaattagccgggcgtagtggcaggtgcctacagccccagctactcgggaggctggggcaggagaatggcgtgaacctgggaggtggagcttgcagtgagccgagatagcgccacagcactccagcctgggcg

SEQ ID NO: 5698 - DNA, 477 bp, Homo sapiens
  misc_feature 1..477: note = U/M: U (0.08:0.89) in Oligodendrocytes
  misc_feature 1..477: note = source = chr18:13635908-13636384; Gene: LDLRAD4 (intron)
  source 1..477: mol_type = genomic DNA
cgcagcagagaagacagctatgctgtgtgtgtgtgtgtgtgtgtgtgtgtgtgtgtgtgtgattgtgccttctgtggatatcggctagggactgtctcaggaaagcctctgcctttggcgtgtttactgctgtcaaaaccctgcccacagccttatagaccccaaagaaaaatgttctcatcctactcagagatgttcaaacaggagtgattgtctgacagtgactacactcacaggagaatgacaaacagcaaggcccagctgtcccttggtaccctcaggggattggttctaggacctccaaataacaccacagtcccagcatgctcaagtcccgcagtctgtcctgctgaacccatggacaaaaaaggtcggcccctccgtatgagaggcttttccatctcatgaatacacattgggttgaaaaaaatctgcgttttagtggaacagccaggtttaaacacatgttgttcaacg

SEQ ID NO: 5699 - DNA, 351 bp, Homo sapiens
  misc_feature 1..351: note = U/M: U (0.09:0.89) in Oligodendrocytes
  misc_feature 1..351: note = source = chr19:47179636-47179986; Gene: PRKD2 (intron)
  source 1..351: mol_type = genomic DNA
cgtgccactgcactccagcccgggtgacaaaagcgaaactccgtctcaaaacaaaacaaaacaaaacaaaatgtcatcagatggtagttagtcaccattgcctgcagaaggctcagagataggcctgttcattgtgaaaaagaggactagcgaatgtcaagcttcaagacaagccagcactcatccgaggctctctccttgatgggaagccatgaaggacaaggcttcactgtatgaacccatccgaggagaggcctggtgcacacaggcaccctgctcccgtcaacacccacaggattctgtgatcctcacacaggtgcaaccacacttaaattcacttgtgcacactcg

SEQ ID NO: 5700 - DNA, 458 bp, Homo sapiens
  misc_feature 1..458: note = U/M: U (0.11:0.91) in Oligodendrocytes
  misc_feature 1..458: note = source = chr5:38678704-38679161; Gene: LIFR (Intergenic)
  source 1..458: mol_type = genomic DNA
cggcttactgcaacctccgactctctggttcaagcaattctcctgcctcagcctcctgagtagctgcgattacaggcatgcgccaccatgcccagctaatttttgtatttgtagtagagacgtagtttcaccatgttggccaagatggttttgatctcctgacctcgcgatccacctgccttggcctcccaaagtgctgagattataggcatgagccaccgcgcccagcccaataagtagtttttttattcctagccctctttccaccctccctctttctgagtgaccagtgtccattcagcactgtctttctaatcacaattcttcctgtgaactctgacttctgttggctatctgttttagccctttcaacagaaatgaaaatacagaaagatgttcaattggtgggagaattgcctgagcctgggaggtggaggttgcaatgagccgagatcacg

SEQ ID NO: 5701 - DNA, 114 bp, Homo sapiens
  misc_feature 1..114: note = U/M: U (0.13:0.92) in Oligodendrocytes
  misc_feature 1..114: note = source = chr2:71773925-71774038; Gene: DYSF (intron)
  source 1..114: mol_type = genomic DNA
cgcaagcgagagtcaggcagccagccgccatgggcttggggatgtgccgagaggcagagggagctggcggggcagaccgcaggtgatggcctcagcttcttcatgcatgttccg

SEQ ID NO: 5702 - DNA, 169 bp, Homo sapiens
  misc_feature 1..169: note = U/M: U (0.15:0.94) in Oligodendrocytes
  misc_feature 1..169: note = source = chr6:151054734-151054902; Gene: PLEKHG1 (exon)
  source 1..169: mol_type = genomic DNA
cgtcttgaagtgccatcagctgtaaccaaagttccacatcccaagacgacagccaggcgttcctgccctcaagaactgaagacaatggagctctctgatagtgaccgacccgtcagcttcggttccacatcatcctcggcctcttcccgcgacagccatggttccttcg

SEQ ID NO: 5703 - DNA, 230 bp, Homo sapiens
  misc_feature 1..230: note = U/M: U (0.12:0.91) in Oligodendrocytes
  misc_feature 1..230: note = source = chr13:27566274-27566503; Gene: USP12 (Intergenic)
  source 1..230: mol_type = genomic DNA
cgagtgatcctatgaaatgggtaccctgcccgtaagagcctgatgacacacgggaccccagttacctctacactgtggctctccctaggcaagatggggagcagagcacaggctagcagtgccgtccctggaccctgcgtccttggatggggcagcaggaacaaatgccagtcctatttccagttctctgagaaatctccatactgttttccattaatatggggcctccg

SEQ ID NO: 5704 - DNA, 233 bp, Homo sapiens
  misc_feature 1..233: note = U/M: U (0.14:0.93) in Oligodendrocytes
  misc_feature 1..233: note = source = chr20:403897-404129; Gene: RBCK1 (intron)
  source 1..233: mol_type = genomic DNA
cgcgccattgcactccagcctgggcaaccagagcgaaactccgtctgaaaatatatatatatatatttagagtagtgcttgtcacatagtaagcctttgttgttgttagcgcttactgtgtaacaaatcactgcaggctcaaaacaacagtcatttattcagctcataaatctgcaagttaggacagttggccctctgtatctgtgggtaccacactggagaattcagcaacg

SEQ ID NO: 5705 - DNA, 257 bp, Homo sapiens
  misc_feature 1..257: note = U/M: U (0.09:0.88) in Oligodendrocytes
  misc_feature 1..257: note = source = chr6:144335615-144335871; Gene: PLAGL1 (intron)
  source 1..257: mol_type = genomic DNA
cgacagtagggtactgacaaaagacagcagggtactgacataagaaaaaacaatagtgtattgagtccagaaatagacccacacataagatctattgggttttgtttgtttgtttgtttggagacacagtctggctctgtcgcccaggctggagtaccgtgacatgatctcggctcactgcagcctccacctcccagtttcaagtgattctactgcctcagcctccagaatagctcggactacagagagatgccacg

SEQ ID NO: 5706 - DNA, 319 bp, Homo sapiens
  misc_feature 1..319: note = U/M: U (0.17:0.96) in Oligodendrocytes
  misc_feature 1..319: note = source = chr17:31192037-31192355; Gene: MYO1D (intron)
  source 1..319: mol_type = genomic DNA
cggaacacgggataagatggcagaaacaggttaactcaatctcattatcaaggactatccttataataaacttaaaatgacctaaatatctgtaaaacccaaagctgatatatgaccaatgatggggtttatccaaaataaatatgttgttgggtttttttcatgggatttgacttttaattgactataaaatttatcttgactttatactggacacaaagcaacagtctgagatagaaccatttgggataacccggcgttgctacagatgatcctctattgtacaagttactcaaagccgactttgtggtcagaggcg

SEQ ID NO: 5707 - DNA, 198 bp, Homo sapiens
  misc_feature 1..198: note = U/M: U (0.11:0.89) in Oligodendrocytes
  misc_feature 1..198: note = source = chr18:74710513-74710710; Gene: MBP (intron)
  source 1..198: mol_type = genomic DNA
cgaacgccccaccctcctttccccaacagcctgaagtgaagctgccgaggttcccttattctttgaaggaatagcagcacgcggcatcgggacattgctgctcttttgaaggtcgacgtgcatttacatttatgagatgagacgtacacacagtgttagggtggcttggctgagaagtacagccctgtgtctgccccg

SEQ ID NO: 5708 - DNA, 457 bp, Homo sapiens
  misc_feature 1..457: note = U/M: U (0.15:0.93) in Oligodendrocytes
  misc_feature 1..457: note = source = chr8:140804332-140804788; Gene: TRAPPC9 (intron)
  source 1..457: mol_type = genomic DNA
cgtcaacatttgccctgtgctagactccaggcctgtgctggtacagaggctctaggggtagagagcacagtcccccattcctgtctgctggggagacagacactcagacagcaggtttagtctcccttgaggtcctgagatggggggtggccaggggagtagggggacctctccatctcaggagagcttctggaggacatgcctaagtggcatgctgagggtggaaagaattatccagatggcagcaggcaggaaaggcctagaggcagagagaacagtgtgagcagaggccaaagagcagtctgtgtgtgccacacgcgtgtgcgcgtgtgtgcgtgggcctggctgcgtgtgggcctggcatggtgtgctgtggggcgcttacatacacagatgcacttgggagacaaatgccccactgttcccactgaacgaagcagcaacttggtggcagacg

SEQ ID NO: 5709 - DNA, 498 bp, Homo sapiens
  misc_feature 1..498: note = U/M: U (0.12:0.9) in Oligodendrocytes
  misc_feature 1..498: note = source = chr13:113404881-113405378; Gene: ATP11A (intron)
  source 1..498: mol_type = genomic DNA
cgtgaatttctgtcttagggaaggagagtctccatcctcccacgtggggacacgcctgctgaaggacgcggggttgaatcccccttcagcctctcgtgaatttctcagtctttcagtccactttgctcactagtgtttactgcactaggttttcgtttgggagaataacaaagcctcctttgagttcggggaaggttggaagtggaagctgcctgtttgggagagatgacttctgacctcttctgggtcacgtagcttccccctgcctttttataacaagtagaattgttatgataattaccgtcatcatgatatttttatttatcattatcctctccttcatcaaacatttatagagcaattaattctgtgccattctaacttcatcggtgtaatgtcatcatgaggtacaatagcattattattcccactttagagatgggaattgaggcataacacgtagacggctgcccactgtggaggagctgaaccttggcg

SEQ ID NO: 5710 - DNA, 228 bp, Homo sapiens
  misc_feature 1..228: note = U/M: U (0.17:0.94) in Oligodendrocytes
  misc_feature 1..228: note = source = chr3:183517689-183517916; Gene: YEATS2 (intron)
  source 1..228: mol_type = genomic DNA
cggctcaatgcaacctctgcctcccaggttcacgccattctcctgcctcagcctcctgagtagctgggactacaggcgcccgccaccacgcccggctaattttttgtatttttagtagagatggggtttcaccatgttagccaggatggtcttgatctcctgacctcgtgatccgcccacctcggcctcccaaagtgctgggattacaggcgtgagccaccgcgcccg

SEQ ID NO: 5711 - DNA, 299 bp, Homo sapiens
  misc_feature 1..299: note = U/M: U (0.15:0.92) in Oligodendrocytes
  misc_feature 1..299: note = source = chr1:36658407-36658705; Gene: THRAP3 (Intergenic)
  source 1..299: mol_type = genomic DNA
cgcccgcctcggcctcccaaagtgctgggattacaggcttgagccaccgcgcccggctggccccaaatattttttatccacagttggtggcatccaccgatgcaaagctcccgaatacacaatacacagggccaattgtatttagctttttttttttttttttttttttctgagatagagtctcgctctgtctcccaggctggagtgtagtggtgctatctccactcgctgcaacctccgcctcctgggtttaagcgattctcctgcctcagcctcccgaatagctgggactataggcg

SEQ ID NO: 5712 - DNA, 375 bp, Homo sapiens
  misc_feature 1..375: note = U/M: U (0.14:0.91) in Oligodendrocytes
  misc_feature 1..375: note = source = chr21:45644734-45645108; Gene: ICOSLG (Intergenic)
  source 1..375: mol_type = genomic DNA
cgtggggcctggctgagggcgagggcaacaggaatgcattgtgtctggggctgagcaggacttgcggtgcctgggccctttgagcctggtgactcctgagtgtgactcctgagtctgaccccatcacccgtgtgggctgacaccagcaccttccacgctgtgcttctgtgtttgccgccggtctccaggagtggccgcttctccatcaaataatactccagtcttcacgcccatggcttcccccagaccccagcccagcccgagaacaaacgctccattttccctcccttacagctgcggtggttgccaccacatggaaggcccagaggaagggaggtctggagtggcctggagctgtggcctccccaggctacg

SEQ ID NO: 5713 - DNA, 242 bp, Homo sapiens
  misc_feature 1..242: note = U/M: U (0.12:0.88) in Oligodendrocytes
  misc_feature 1..242: note = source = chr19:55799672-55799913; Gene: BRSK1 (intron)
  source 1..242: mol_type = genomic DNA
cgtctctacaaaaaatacaaaaattagctgagtgtggtggtacacctgtagtcctacctacttgggaggctgaggtgggagaattgcttgaacctgggaggcagaggctgcagtgagccaagatcgtgccactgcattccagcgtgggcgacagagcaagactctgtctcaaaaaaaaaaaaaaaaaaactccaaacaacaacaacaacaaaaaaaaatggttgatggaaactggaaccccg

SEQ ID NO: 5714 - DNA, 331 bp, Homo sapiens
  misc_feature 1..331: note = U/M: U (0.18:0.94) in Oligodendrocytes
  misc_feature 1..331: note = source = chr2:55186307-55186637; Gene: EML6 (intron)
  source 1..331: mol_type = genomic DNA
cggctggtggccaaggctcacacaggccccgtgttcacaatgtacacaacccttcgggatggactcatagtgaccggcggaaaagagaggccgtaagccaaagctcctatggaaacaacttgtcgtttgttgttatcttgggagaaactgacaaaagtgttcccaacttggagaaaatgcagactgtcatcctcctatcttttttgcattaggaagatcagtctgctctctctccaagagggccctaagtcaagatcctcacaaggaagagaggagtgcagaggtggtttgatgatagtttaaaaacctgagagaggcatggtggttcacg

SEQ ID NO: 5715 - DNA, 468 bp, Homo sapiens
  misc_feature 1..468: note = U/M: U (0.11:0.87) in Oligodendrocytes
  misc_feature 1..468: note = source = chr16:75332090-75332557; Gene: CFDP1 (intron)
  source 1..468: mol_type = genomic DNA
cgtaaaagcaaatatttcaaaattgaaaaaggtctgaaatctaaaacacttccagtcccaagcatttcagataagggatattcaacctgtatctgggaacccaccctgcaggaggacagagggcctttgagggtggtaaggcccaatggagtgctgacccgacgtagtcaccctggctgaagtccctgagatgcctcctgcaccgctggtcaggaagagggagagcacatggaagtgcagggaaacctgaggcagtcactgaggacactccaaagctgcattactatcatgctgcccagacaaagccagcattctgttccccaagtgagcattcaaggcagcacagacacaggacaaaaagtgggtaaatgcattttccaacaccacaaagcatgggctacggcagcactccgaggctagaataaagctctgggaatgatgtacagagatacagactttgctgcctcg

SEQ ID NO: 5716 - DNA, 267 bp, Homo sapiens
  misc_feature 1..267: note = U/M: U (0.1:0.85) in Oligodendrocytes
  misc_feature 1..267: note = source = chr1:54584079-54584345; Gene: CDCP2 (Intergenic)
  source 1..267: mol_type = genomic DNA
cgcccctccccttgtgctccagcccctgcctcccactctgtaacaggccttgctctacttcaatgtccacctctcgcccccttccttagcttttcccgtcagtatttaaatgcacttaaagcctttccatcctcaacaaacaaaaccaaacagacagaaaccagggtcaccatccactaaatcagccccctccaccctcaccggtgctccagctcctcctcgcctctctcctgcttgagaaaggccacacttctccagggagccacg

SEQ ID NO: 5717 - DNA, 129 bp, Homo sapiens
  misc_feature 1..129: note = U/M: U (0.18:0.92) in Oligodendrocytes
  misc_feature 1..129: note = source = chr20:52711064-52711192; Gene: BCAS1 (Intergenic)
  source 1..129: mol_type = genomic DNA
cgtaatgcttcataggagttatcctaatagctcgctgcaatagcaggcgctgatgggattcttgcctgctgtaccgcgtcttggcaaatactgatgtgggattattttgttcgatcccaataataagcg

SEQ ID NO: 5718 - DNA, 160 bp, Homo sapiens
  misc_feature 1..160: note = U/M: U (0.2:0.94) in Oligodendrocytes
  misc_feature 1..160: note = source = chr18:10442102-10442261; Gene: APCDD1 (Intergenic)
  source 1..160: mol_type = genomic DNA
cgagatcgcaccgctgcactccagcctgggagacagagggaaagtctgtctcaaaaaaaaaaaaaaaaacaacagagagagagagagagatccagcgatgcatcagagtcacaccgatacagtgaaaacctcgttgcagcgcatcagacaccaacgtccg

SEQ ID NO: 5719 - DNA, 350 bp, Homo sapiens
  misc_feature 1..350: note = U/M: U (0.21:0.94) in Oligodendrocytes
  misc_feature 1..350: note = source = chr12:121282907-121283256; Gene: SPPL3 (intron)
  source 1..350: mol_type = genomic DNA
cgcattcacttctggttccggagcggactagacagccagcccagtccttgatagagcccgtcgccactggtggcacaggtggcctgaatgtaccagttcatgtggcaaagggagtgcagtcccagcttgtctgtggtccctgctgcattcacggcattggagaggtcctgcttgttggcaaaccccaggaggacagtatcccagagctcgtcctcggccagcatcctcatgaactcctcgcaggcctcaatcatacgccctctgtcagtgctgtccactacaaaaatcaggcctgtgtgttctggaagtagtggcaccacagaggccggatcttgtccgagccgcccacg

SEQ ID NO: 5720 - DNA, 409 bp, Homo sapiens
  misc_feature 1..409: note = U/M: U (0.17:0.9) in Oligodendrocytes
  misc_feature 1..409: note = source = chr18:77137458-77137866; Gene: ATP9B (exon)
  source 1..409: mol_type = genomic DNA
cgcagggtttgccattgctaccaagcaagcaccacaagaaagggagggtacgccaggcgagcccagggcacagatgctgagacagcctctccttctcagtgcagggacgtcacccctgccaggcaagcccagggcacagatgccaggatggcttctccctctcagtgcgaggcttcacccctgccaggcaagcccagggcatagatgctgagacagcctctccctctcagtgcagggacgtcacccctgccaggcaagcccagggcacagaggccgggacggcctctccctctcagtgtgaggcttcacccatgctaggcaagcccagggcacagatgccgggatggcccctccctctcagtgcgggaacgtcacccctgccaggcaagcccagggcacagatgctgcg

SEQ ID NO: 5721 - DNA, 471 bp, Homo sapiens
  misc_feature 1..471: note = U/M: U (0.18:0.9) in Oligodendrocytes
  misc_feature 1..471: note = source = chr21:45650440-45650910; Gene: ICOSLG (intron)
  source 1..471: mol_type = genomic DNA
cgccactgcgtcctgctgctgtgtcttacatggctgaaacacagacctccgggctctgtcgcggagctggccagagtcacagacccacagggcaggagtgctcaaggcagcctcagcggcttccctggaaatgaccaccaccccggcctctacatgcagaagccaccctgcccacccgacctgcagggcagacctcgcagcgcccttctggcttggcagtgtcaggaatgtcagagatgctgggtttcaaaaccactttgtgggatagttcgggttgctaagcctcatgaatattagtgctaccacaacaaagttcctttgtttttttgggggggacagagtcttgctctgtcgcccaggctggagtgtagtggcgtgatctcggctcactgcaagccccgcctcccgggttcacgccattctcctgcctcagcctcatgagtagctgggactacaggcgcctgccacacg

SEQ ID NO: 5722 - DNA, 161 bp, Homo sapiens
  misc_feature 1..161: note = U/M: U (0.05:0.88) in Oligodendrocytes
  misc_feature 1..161: note = source = chr16:74782126-74782286; Gene: FA2H (intron)
  source 1..161: mol_type = genomic DNA
cgctgcgcgtggagcagtgaagcaaacgccgccctctttagtgcaaaccttgttctattctgcacttcccccaccccccacgtggcagctggaacagccctgccatctccaccacaagcaccttcaccgaggcgcacatgtggcggcgtctcactggggcg

SEQ ID NO: 5723 - DNA, 347 bp, Homo sapiens
  misc_feature 1..347: note = U/M: U (0.06:0.88) in Oligodendrocytes
  misc_feature 1..347: note = source = chr4:55127142-55127488; Gene: PDGFRA (intron)
  source 1..347: mol_type = genomic DNA
cggatttttgtgtagaaatggtcattgttcatctaagctgctactgttgcttctctcagttgtcgggatgagactgtcctttctgactgcatcctattcagagcgtgcttccttttgcagggctgagcctaatcctctgccagctttcattaccctctatccttccaaatgaaaatgaaaaggttgtgcagctgaattcatccttttctctgagatgctttggggagagtgaagtgagctggcagtaccccatgtctgaagaagagagctccgatgtggaaatcagaaatgaagaaaacaacagcggcctttttgtgacggtcttggaagtgagcagtgcctcggcg

SEQ ID NO: 5724 - DNA, 350 bp, Homo sapiens
  misc_feature 1..350: note = U/M: U (0.13:0.91) in Oligodendrocytes
  misc_feature 1..350: note = source = chr3:194109864-194110213; Gene: GP5 (Intergenic)
  source 1..350: mol_type = genomic DNA
cggaggctgaggcagaagaatggcgtgaacccgggaggtggaggttgcagtgagtggagatcgcgccactacactccagcctggcgacagagggagactgtgtctgaaaaaaataaataaataaataaaatctaataaaaacaaaggtttcattgagtgtggcagcagctgaaacacagagcctcccctaacccccagagcctggacttggaaagatccatgctggggtcatcaaagccagggagcacctggaagcatcgacagggaggtggaaggcgggcgggcgtcaggggcagatgttgctcattgtcttcttcctctaggcctcagcctccagtaccctggacccg

SEQ ID NO: 5725 - DNA, 77 bp, Homo sapiens
  misc_feature 1..77: note = U/M: U (0.05:0.96) in Oligodendrocytes
  misc_feature 1..77: note = source = chr20:37138022-37138098; Gene: RALGAPB (intron)
  source 1..77: mol_type = genomic DNA
cgtcccagcagggttaggctgtcctcagccgctcttggtttacacgctctaggaacgcgttccctgtggtagatgcc

SEQ ID NO: 5726 - DNA, 145 bp, Homo sapiens
  misc_feature 1..145: note = U/M: U (0.03:0.91) in Oligodendrocytes
  misc_feature 1..145: note = source = chr12:123332891-123333035; Gene: HIP1R (intron)
  source 1..145: mol_type = genomic DNA
cggggttgatgggcacgtgattgggggccggccctcttccggcggccctggcctctctcagccgggtttgctgagcccccgtgctccagtctctgcttccacacttggccttgacattgcaggcatcattctgggcacacaccac

SEQ ID NO: 5727 - DNA, 284 bp, Homo sapiens
  misc_feature 1..284: note = U/M: U (0.05:0.93) in Oligodendrocytes
  misc_feature 1..284: note = source = chr9:115509635-115509918; Gene: SNX30 (Intergenic)
  source 1..284: mol_type = genomic DNA
cggctaacacaaacatgaagaaggcctaagcacatgctgtaccaggggaaagaatgagcgaatgatgcattgagactgctttgtttctgaggtctgggtgctcacaggcagccccaatacgcttgctagtgaggtcgataggatttgtttggtaagcgtactaaattctggggcccaaagccctgtctcctgaaaggtgccagcctaagtgtctaagattccttatgaattgggagggctccatgctgtgttcttgggttctggtggcattggggacctccctc

SEQ ID NO: 5728 - DNA, 288 bp, Homo sapiens
  misc_feature 1..288: note = U/M: U (0.06:0.93) in Oligodendrocytes
  misc_feature 1..288: note = source = chr6:17839739-17840026; Gene: KIF13A (intron)
  source 1..288: mol_type = genomic DNA
cggatgaaccctggcaaattattttacgtgaaagaagccaaacacaaaaggccattgtcctgggttgaacagtattcatgtccgccagaccctcagaatgtgaccctatttggaaaaagggtccttgcagatgtaatcagttaagatgagatcatactggattagggagggccctaatctaatgagtgatgtccttataagaaggtcatataaagacacccaggggagacggccacgtgaagatgcaggcagagactggagtgatgcatctacaagacagggaacgcc

SEQ ID NO: 5729 - DNA, 64 bp, Homo sapiens
  misc_feature 1..64: note = U/M: U (0.05:0.92) in Oligodendrocytes
  misc_feature 1..64: note = source = chr14:52657938-52658001; Gene: PTGDR (Intergenic)
  source 1..64: mol_type = genomic DNA
cggaggttgcagtgagccgagatcgtgccgctgcactccagcctgggtggcagagcaggactcc

SEQ ID NO: 5730 - DNA, 155 bp, Homo sapiens
  misc_feature 1..155: note = U/M: U (0.08:0.94) in Oligodendrocytes
  misc_feature 1..155: note = source = chr18:74721776-74721930; Gene: MBP (intron)
  source 1..155: mol_type = genomic DNA
cgatgggtgaggacccgccggcgtcttaccttgtacatgttgcacagcccaggctggctgcgggcatgagagggcagagggctccggcccggctttagccagggtacctgccgggggacacagagtgggctgcgtgagtccgggtgggcgccgcc

SEQ ID NO: 5731 - DNA, 275 bp, Homo sapiens
  misc_feature 1..275: note = U/M: U (0.03:0.88) in Oligodendrocytes
  misc_feature 1..275: note = source = chr3:42190918-42191192; Gene: TRAK1 (exon)
  source 1..275: mol_type = genomic DNA
cgggatattcttctgtccagtattctggaagggcggggaggcatggcagcgttttacttgacgttgatggtgctgtgaagtccattctttcctctgcaagactactgactatgcagaaatttatcgaagcggattattatgaactagactggtattatgaagaatgctcggatggtaattatggcccctgcaaaacagagccgggatgtataggggtattgtctccttctgggtggggggtgtcctgaaacctttaggggagacaggcggctggc

SEQ ID NO: 5732 - DNA, 362 bp, Homo sapiens
  misc_feature 1..362: note = U/M: U (0.05:0.9) in Oligodendrocytes
  misc_feature 1..362: note = source = chr12:120951809-120952170; Gene: COQ5 (intron)
  source 1..362: mol_type = genomic DNA
cgacgggcaggctatgcaatggaagagatgattccagaaatggaacactgcttatcatttcaatatctttgttttccgttctttatggctgagtaccagagagaagggaaacatgtttgtcagtaggagtaaggaaacatagtgcctttgtctaaaaacactagcgactgtccgccttctgaccagtattgatggttaacaaaggagcccttcagcttgggggccaagtgggctgcagctcgtctaggcagctccttctgggggtgggaggaggaagaggaggaagatttgagctaaaataaccatagacactcatggtgggggaggagaaggagagaaatgctgatgttgacctgagggac

SEQ ID NO: 5733 - DNA, 390 bp, Homo sapiens
  misc_feature 1..390: note = U/M: U (0.07:0.91) in Oligodendrocytes
  misc_feature 1..390: note = source = chr14:34257319-34257708; Gene: NPAS3 (intron)
  source 1..390: mol_type = genomic DNA
cggtggctacagctaagcacccaactgtggtattaagtagaaagtgtgattctagcacacccccctcacttacacacacagatacacactctagtgaattcaaaaataatttttgagtctgtagcagaaggcacctgctctccgttctccgcggccactgacgaaggtacctccaggagggggtgaatggcgccacagatgcgtcctcctatcgccatgacgataatgaagctctttgttcggctgtgtgaatgtgaagggtggaatctccgatgatctcaccatttcctatttattctatacttacctgaatgcaccatgtcttgcagctttttaatgcatatgcaaaccactaaaatgtccttttgtgagacactttgctaaaagacc

SEQ ID NO: 5734 - DNA, 364 bp, Homo sapiens
  misc_feature 1..364: note = U/M: U (0.12:0.94) in Oligodendrocytes
  misc_feature 1..364: note = source = chr11:604874-605237; Gene: PHRF1 (exon,intron)
  source 1..364: mol_type = genomic DNA
cgacgtgatggtgacactgcaatgcccgagagcctctggtagcctgcaggagcttcacggccgatgtgtgcggcattgttcctgcttgtcggtcatcatgcctgagaagcccattgactttggcttagtattttccggctctagtgttcactgttgctgatgaaggcttcacgtggcatttacagagccctcgtagatgccatccccgtctctctgttcatctttttctttgttactggattcagagtgaagccaccactcgctctcgaatcgcgcggacgctgggcctgcgcaggcctgttcacagcagctgcatcccgtcagtgttgaagccagtggagccctctttggggctgctgagagc

SEQ ID NO: 5735 - DNA, 116 bp, Homo sapiens
  misc_feature 1..116: note = U/M: U (0.09:0.89) in Oligodendrocytes
  misc_feature 1..116: note = source = chr17:30821748-30821863; Gene: MYO1D (exon)
  source 1..116: mol_type = genomic DNA
cgggctccgggccaggcctccgcggggcgtcagttcccgggcacgctgaggatgaagcccgagcgattcttggtgaagtcgggctggggctggttgagccgcgtctccacggagac

SEQ ID NO: 5736 - DNA, 272 bp, Homo sapiens
  misc_feature 1..272: note = U/M: U (0.07:0.87) in Oligodendrocytes
  misc_feature 1..272: note = source = chr8:77316589-77316860; Gene: ZFHX4 (Intergenic)
  source 1..272: mol_type = genomic DNA
cgctggctggcactccacgccagtgcacggctccatggaatgcctgctgttggacacttgcagagctctgccaccaagcaacctcctgcattggaaatcgggggactactccaggatcttatgcgtgcttgctgtttgaagctgcagaaaagtgaataatcaattaagtattgatttcttgtaagatttggtaaatttcaaaggcaagacaaagaggatggcttaaggaaacactgcagggacttggcgtaaattagacaactaacggaagc

SEQ ID NO: 5737 - DNA, 78 bp, Homo sapiens
  misc_feature 1..78: note = U/M: U (0.11:0.9) in Oligodendrocytes
  misc_feature 1..78: note = source = chr8:25542884-25542961; Gene: CDCA2 (Intergenic)
  source 1..78: mol_type = genomic DNA
cgttctcgcagcgccagccccatgggtggcctccatctcggtggagcctccgtcttggcactgccatctgctctgagc

SEQ ID NO: 5738 - DNA, 335 bp, Homo sapiens
  misc_feature 1..335: note = U/M: U (0.11:0.9) in Oligodendrocytes
  misc_feature 1..335: note = source = chr19:36267294-36267628; Gene: ARHGAP33 (intron)
  source 1..335: mol_type = genomic DNA
cgcctctgtgcaggccccacgctccaggcacagagagagtcagctcccatcctgccttggggaaccttatgggctggagggggacagaccctgagggtgagaccctgagggtgactgggggttgcagggacatggagcagggagacgctacagcccagtgaatctgtctggcagctggttaatttattcatcagattttacccagtccctgctgcgcgcgactgggctggcactggggacccagaaaagaatcaggaacaatcatgtctgaacaccaactcaatgcccagctctatgctggggagctcagtctggggccctccttctgggaggcc

SEQ ID NO: 5739 - DNA, 437 bp, Homo sapiens
  misc_feature 1..437: note = U/M: U (0.15:0.94) in Oligodendrocytes
  misc_feature 1..437: note = source = chr2:160087061-160087497; Gene: TANC1 (exon)
  source 1..437: mol_type = genomic DNA
cgttcagagcggtacagctgagcacagaccccgcaacacgccgttcatgggcatcatggataagactgcgaggttccaacagcagagcaatcctccaagccgcagctggcactgtccggcaccagaggggctgctgacaaacacgtcttctgcagctggcctgcagtctgctaacactgagaagccctctctcatgcaagtgggaggatataataaccaagccaaaacctgttctgtttctaccctgagtgcaagtgtccacaatggggcacaagtgaaggagctagaagaaagcaagtgccaaattccagtccactctcaagagaacaggataactaagactgtttctcatctgtaccaggaaagtatctccaaacagcagcctcatattagtaatgaagcccacaggagccacctcactgcagccaaaccaaagc

SEQ ID NO: 5740 - DNA, 98 bp, Homo sapiens
  misc_feature 1..98: note = U/M: U (0.13:0.89) in Oligodendrocytes
  misc_feature 1..98: note = source = chr10:131694675-131694772; Gene: EBF3 (intron)
  source 1..98: mol_type = genomic DNA
cgctcccggccacgcggccaccgtcagccaccctggcctggcgtcgcccgccattcctggcccctccgagcagctggctggacggggcgggggccggc

SEQ ID NO: 5741 - DNA, 242 bp, Homo sapiens
  misc_feature 1..242: note = U/M: U (0.09:0.85) in Oligodendrocytes
  misc_feature 1..242: note = source = chr7:158044788-158045029; Gene: PTPRN2 (intron)
  source 1..242: mol_type = genomic DNA
cgcctaagcagcctgcctctccagttgccatggcaactctgctctggttgccgcacagcctcaagcctcagctgcttggagtgggtgggaacgcgagagcacttgagcaccagtggcctgacaactctgcctcgtccccatcacctctgcggcgagaatcagagcagtcgcagaagctcctgccacaccactcccataatctctcagtgccaattacttggaggaaaaatggaatcatcccc

SEQ ID NO: 5742 - DNA, 101 bp, Homo sapiens
  misc_feature 1..101: note = U/M: U (0.13:0.88) in Oligodendrocytes
  misc_feature 1..101: note = source = chr8:25543136-25543236; Gene: CDCA2 (Intergenic)
  source 1..101: mol_type = genomic DNA
cgcgcattctgctcagctgggcggcgaggagctggcccagagcggcaccgcgagctccctcaccgccgtctgcctgccatttgctgccactggggacctgc

SEQ ID NO: 5743 - DNA, 428 bp, Homo sapiens
  misc_feature 1..428: note = U/M: U (0.21:0.91) in Oligodendrocytes
  misc_feature 1..428: note = source = chr22:31091742-31092169; Gene: OSBP2 (intron)
  source 1..428: mol_type = genomic DNA
cggacatgacctctggcaagcttgggtttttgggcaagtggggaggtggagtaagggagtgatctggggcctcagttcccttctgcttggcagttgtggggcttggggcagctagctagagtcagcccctcaaagtccttgccctttctggttcgggagctaacatcattgtgtgtttgggattgagggagagagtcaccttgttcagtccttaggacccacactcttaggaagggctgcttattcttcccgcctggggcagttactcccacctttcctgatgcctctggttgccaggccttgggctgggcaccacagactcacagatgtattggacacggttcttggccttcaggagtccatcttggcattttgcggagagctaggaagtgttttgctgccctcctttcttattccagacccagcac

SEQ ID NO: 5744 - DNA, 131 bp, Homo sapiens
  misc_feature 1..131: note = U/M: U (0.22:0.91) in Oligodendrocytes
  misc_feature 1..131: note = source = chr9:73231641-73231771; Gene: TRPM3 (intron)
  source 1..131: mol_type = genomic DNA
cgtatgtgctgagagagtccccttacacacaagccccaggagaagccagcgctgtatttctctcatgtataaacatcacgcataaatctatgcaaggacactaaatacggaagcctttcttctgagagggc

SEQ ID NO: 5745 - DNA, 187 bp, Homo sapiens
  misc_feature 1..187: note = U/M: U (0.04:0.94) in Oligodendrocytes
  misc_feature 1..187: note = source = chr19:58447249-58447435; Gene: ZNF418 (promoter-TSS)
  source 1..187: mol_type = genomic DNA
cggatagaatgtcttggctgtgagttgtccagttgttggcgcattgaacaaagaagtgaacaaaacacacaaaaaaagcaacgaaagaacggaccaatgaaagcgcagatttattgaggggaaagtacactccacagaagtggaatgtaggtgtgggagcaggcgaccaagcggctcaagaaccccg

SEQ ID NO: 5746 - DNA, 125 bp, Homo sapiens
  misc_feature 1..125: note = U/M: U (0.03:0.92) in Oligodendrocytes
  misc_feature 1..125: note = source = chr17:76455195-76455319; Gene: DNAH17 (exon)
  source 1..125: mol_type = genomic DNA
cggacgatgttgatgcaccaggagcacaggccggcggcggccgtggacttggagcggatgaactcggggtcgaacgtcgggttgccttggtagggcctagcgagggaaccagagggccggagtcg

SEQ ID NO: 5747 - DNA, 83 bp, Homo sapiens
  misc_feature 1..83: note = U/M: U (0.05:0.93) in Oligodendrocytes
  misc_feature 1..83: note = source = chr7:27591588-27591670; Gene: HIBADH (intron)
  source 1..83: mol_type = genomic DNA
cgacttgctatggtgtctctattgtttaccagcgacattcgcagaaaaaggcgacagctgggacagaaagctgctactcaacg

SEQ ID NO: 5748 - DNA, 93 bp, Homo sapiens
  misc_feature 1..93: note = U/M: U (0.07:0.95) in Oligodendrocytes
  misc_feature 1..93: note = source = chr9:92051265-92051357; Gene: SEMA4D (intron)
  source 1..93: mol_type = genomic DNA
cgctggtcagcgtgtcctcagccaccagggaggatggatactcaggacaccatctggccccgccgccccatcctcacgcagggcctctgctcg

SEQ ID NO: 5749 - DNA, 172 bp, Homo sapiens
  misc_feature 1..172: note = U/M: U (0.05:0.93) in Oligodendrocytes
  misc_feature 1..172: note = source = chr16:75129190-75129361; Gene: ZNRF1 (intron)
  source 1..172: mol_type = genomic DNA
cgcctcctttctcctgggctgactgctgccagttctctaagtctgttgtcacatgtgctgcaggcttcgcgtcagtcctgtcgcatgcatgctgtcaggacgctcaggctcagctttgtccctgttcgccgtctccgcttgggaccagggagggagaggagccttccctgcg

SEQ ID NO: 5750 - DNA, 360 bp, Homo sapiens
  misc_feature 1..360: note = U/M: U (0.04:0.92) in Oligodendrocytes
  misc_feature 1..360: note = source = chr18:74728663-74729022; Gene: MBP (exon)
  source 1..360: mol_type = genomic DNA
cggaacgagaccttagacagcaagaggctacgtgccagttcttcctctaatggctgagttcacctactgatttctcctttgctttttccatttaaactaaaactcctctactcctcagagctcaccttgccagagccccgcttgggcgcacccctgtcaccgccaaagaagcgcccgatggagtcaaggatgcccgtgtctctgtgccttgggaggaagccatgcctggcatggtccatggtacttgctgtggccaggtacttggatccgtgcctctgggagggtctcttctgtgacgccatcacatccaggctctcggaggtggctgcactgtcttcttggatggtctggagctcgtcg

SEQ ID NO: 5751 - DNA, 430 bp, Homo sapiens
  misc_feature 1..430: note = U/M: U (0.06:0.94) in Oligodendrocytes
  misc_feature 1..430: note = source = chr12:12397259-12397688; Gene: LRP6 (intron)
  source 1..430: mol_type = genomic DNA
cgtaaagatccatctaaattagaaacttcaatccgattagtttcagaatctgtccagtacaatttttctccaagccaatcacatgccagcccatcgggggacaataatccagaaacaacaacattctgcacactctcagttttgttaaattctgttcgtttaatggcttcttcgctgacatcactccagtatatcaagccatgactaaacacaaagtccaccgcagctgcatcctccaagcctccaactacaatcgtagcattctctttgccatttgtagcatcaaccaatcgcaagtcccgtctgtttgcataaagcaacaaaggggccgctagaacaaaaaaagaaaaatatgtaagtgaaaaggaagaaaacgtattggttcttataaactgcgtttcaaatcggtttaagtgagcaaagactgtcg

SEQ ID NO: 5752 - DNA, 386 bp, Homo sapiens
  misc_feature 1..386: note = U/M: U (0.08:0.95) in Oligodendrocytes
  misc_feature 1..386: note = source = chr9:134836851-134837236; Gene: MED27 (intron)
  source 1..386: mol_type = genomic DNA
cgtaaagcatttacacttgattagctgtagtatgagtatcagcaggacttggaaacttttcatcatcttcatgaaggttctgagggtccgctgacagccctgggaaatagtgtttttccagatttccactgtaaataatggctgaccattggcctctgtgtttcaaggcctgatgaaggcagcagggcacaggacagaaccgctgctttcgtgaactagcgaaggagcctcatgctggggaggcgctgctttctacagtcccttcccacttagggtagcacagcctggccatatccacaggggccctaaacactctacagctaaaaagccttcttctgctctctctctctctgaaagatgacaatatgtgctgtgcacccttagcg

SEQ ID NO: 5753 - DNA, 141 bp, Homo sapiens
  misc_feature 1..141: note = U/M: U (0.08:0.94) in Oligodendrocytes
  misc_feature 1..141: note = source = chr18:74721791-74721931; Gene: MBP (intron)
  source 1..141: mol_type = genomic DNA
cgccggcgtcttaccttgtacatgttgcacagcccaggctggctgcgggcatgagagggcagagggctccggcccggctttagccagggtacctgccgggggacacagagtgggctgcgtgagtccgggtgggcgccgccg

SEQ ID NO: 5754 - DNA, 289 bp, Homo sapiens
  misc_feature 1..289: note = U/M: U (0.04:0.9) in Oligodendrocytes
  misc_feature 1..289: note = source = chr7:129565080-129565368; Gene: UBE2H (intron)
  source 1..289: mol_type = genomic DNA
cgggaggctgacgaagagaattgcttgaatccaggaggcagaggttgcagtgagccaagattacgccactgcactccagactgggcaacagagcaagactcagtctcgaaaaaaaaaagatattcataaacaaaaattcacggtgttctccaggtggaaaaaaaacaagaaaaaaataaaatccacaatgtgggacagttcatgggagctaggcctatacaataatgctcccaaatatgtaaatgaaagaaaaaagcgaaacaacattcactgtgaaagacactgtacg

SEQ ID NO: 5755 - DNA, 494 bp, Homo sapiens
  misc_feature 1..494: note = U/M: U (0.08:0.94) in Oligodendrocytes
  misc_feature 1..494: note = source = chr6:3441986-3442479; Gene: SLC22A23 (intron)
  source 1..494: mol_type = genomic DNA
cgcatgccagggatattcaatttcccaaccgtctccggctacatgaggagctcccttctccagggcagacacgatcttctacccatctgtgacaccagcccagggcagatgttctgagaggaagacagggacaccacgcaagcagctgcagcactgcctctgaaggggagggcacgggagggatggagggattgtccggaactgtcttcaagaaggagggcatcacccaagttcccagccgcacatgcaccatagccaaggggtagaggcgacccaagtgtctgccgatgggtgaacaaacaaacagaatgtggtgcaggcacacaatggcgtattcctcagtctaaggcaggcaggaaacgctcacacacgctaccacatggatgagccttgaagacatcacgctgagcgacatgagccagtcacaaaaggacaaatgctctatttatatgaggtacccggagtaagcaaattcaaagaggcagaaggtagcg

SEQ ID NO: 5756 - DNA, 241 bp, Homo sapiens
  misc_feature 1..241: note = U/M: U (0.07:0.92) in Oligodendrocytes
  misc_feature 1..241: note = source = chr20:34807783-34808023; Gene: EPB41L1 (intron)
  source 1..241: mol_type = genomic DNA
cgccccatgcccccagccgagctgcaggcgagaaggtcatgactgttgttctgcttcggcttcgccatctgtaaagtggacagagaaaacctgtagtgtttaccagcttctggaatactgtgcgctttgtcctgtgccacatgttgttctaggcacgggcccttcccacacggcgttgacagccaggctagggggaacaatactctcctctttgaagtaactgtgaaccatggcgtgtgcg

SEQ ID NO: 5757 - DNA, 315 bp, Homo sapiens
  misc_feature 1..315: note = U/M: U (0.07:0.92) in Oligodendrocytes
  misc_feature 1..315: note = source = chr16:69833813-69834127; Gene: WWP2 (intron)
  source 1..315: mol_type = genomic DNA
cggtggtattggaccctccttcataaggcctctattcagagcagtaccatatgtggcgaatgaatggcatggaaagaaaggctcctttttctcttgatatctggaaagtattttctgaaagtggatgtagcttaagagagaggtgggggcggggagagttgcgtcccagcgagcgtgttacatgatttaagagtctttcttttctctccaagcctgtccttttaagcgatgggccacttgaaaggtctttgagcctcctctggtcttttcttttcggctgggcacatagagatgtgctgaacccacactggcccg

SEQ ID NO: 5758 - DNA, 471 bp, Homo sapiens
  misc_feature 1..471: note = U/M: U (0.06:0.91) in Oligodendrocytes
  misc_feature 1..471: note = source = chr6:20096860-20097330; Gene: MBOAT1 (Intergenic)
  source 1..471: mol_type = genomic DNA
cggacacagagacagttgcaacctgggactgcagctggaaatgctgaaaggccattttgcccatcaagcagacaatagaccgaaagaaagccagggatgaatggacgattgattgtagccagcaactgcttagacagtgtaaatcgtaatgccaaaagtgcatatcccctatgaattttctttgttcgagaacaaaaggggccattggatcctgagggccatgtggacacagaaaggcttttttctagaaaattgttccccgtctgcctccacaggttggatcagcagttacaataaaactgtctgtgaggctgcgtaggatcggaggccaacccacactcggagagtgcagacttataggtccccaggaaacacccacctcacctggacactcattttcaggcctaagaagggtgttcccagctgagaaaatgtcccaggaaagatagagggctcctctgagacccaccg

SEQ ID NO: 5759 - DNA, 226 bp, Homo sapiens
  misc_feature 1..226: note = U/M: U (0.09:0.93) in Oligodendrocytes
  misc_feature 1..226: note = source = chr2:101181112-101181337; Gene: PDCL3 (intron)
  source 1..226: mol_type = genomic DNA
cgattatcccggtgcccttttcacagtgctcctgatttcatattccaaagcaagcctgagctccattagcagtgttcttgccacaccatgcaaaccggtgcttgggcagctgggttctagatctaagagccacttttacatcagtctttgtgacaatgatcctttgtgattttgatgctggctgatttggccagccgttctagcatggcagtgcctctaaatgccg

SEQ ID NO: 5760 - DNA, 323 bp, Homo sapiens
  misc_feature 1..323: note = U/M: U (0.1:0.94) in Oligodendrocytes
  misc_feature 1..323: note = source = chr11:63818827-63819149; Gene: MACROD1 (intron)
  source 1..323: mol_type = genomic DNA
cgtgtggtcacgagctagagaggcagcagggactctggcggcttggcctgacactcagtggtgacagtgatggcggacccaccctccccagggtggcactgattgagtctcattgttgtggggcgggggcaccctctcggaagcctcgctcctggctcctgggcggcagagctgtcggccgggcaggctaacagctgtttgtgcagagactaaatctgtccgggtctgacagacggccttgtgccaccaccgccattcctgcgtggagcgggcagtgggctggtggcagtgtgtacatcagccctctccgagctcacggcccg

SEQ ID NO: 5761 - DNA, 159 bp, Homo sapiens
  misc_feature 1..159: note = U/M: U (0.08:0.9) in Oligodendrocytes
  misc_feature 1..159: note = source = chr9:100769817-100769975; Gene: ANP32B (intron)
  source 1..159: mol_type = genomic DNA
cgttgccaaccagcaccacagctgcagaactattcaagtcttttgaacgattacatatcaggaaaactgaattggtcattttgtgtcgtatatgcacagatggagcggctgccatggctggacggctttctggtttcactactcgagtcagagaggtcg

SEQ ID NO: 5762 - DNA, 194 bp, Homo sapiens
  misc_feature 1..194: note = U/M: U (0.1:0.92) in Oligodendrocytes
  misc_feature 1..194: note = source = chr12:110487715-110487908; Gene: C12orf76 (intron)
  source 1..194: mol_type = genomic DNA
cgtaccacctacttgctcaaatcaatcacgaccctttcatgtgaaatctttagtgctgtgaggagcccttaaaagggacagaaattgtgcattcggggagctcggattttaaggcagtagcttgccgatgctgccagctgaataaagcccttccttctacaactcggtgtctgagaggttttgtctgcggctcg

SEQ ID NO: 5763 - DNA, 248 bp, Homo sapiens
  misc_feature 1..248: note = U/M: U (0.09:0.91) in Oligodendrocytes
  misc_feature 1..248: note = source = chr22:38479240-38479487; Gene: SLC16A8 (promoter-TSS)
  source 1..248: mol_type = genomic DNA
cgcgtgagggtctcgggacaacagaacaaacagcagaggggcagatgccggctgcaaagggccgctgtgcgtgattttcctctttagccttccgccatgttcctaatgtttctcagtgatcacaaatgactattgtcattagaacattaaggggacaaaagccactttcaacagatatcagccaggggagctgagttcccatgcatctcagctcagccatggattccctccctgacttgggccggtcg

SEQ ID NO: 5764 - DNA, 222 bp, Homo sapiens
  misc_feature 1..222: note = U/M: U (0.08:0.89) in Oligodendrocytes
  misc_feature 1..222: note = source = chr19:7917329-7917550; Gene: EVI5L (intron)
  source 1..222: mol_type = genomic DNA
cggcatacccatcctccttcccccacgaaggtcccctctgtcagaccccccgaccctcagccttcactcccaggagagcctccttggcctgcttttctttttttcttttacctttttctttttttttttaagtcggagttgctctgtggcccaggctggagtacagtggtgcagtcctagctcactgcagcctccacctcctgggctgaagcgatcctcccg

SEQ ID NO: 5765 - DNA, 412 bp, Homo sapiens
  misc_feature 1..412: note = U/M: U (0.09:0.89) in Oligodendrocytes
  misc_feature 1..412: note = source = chr20:47354006-47354417; Gene: PREX1 (intron)
  source 1..412: mol_type = genomic DNA
cggccactggcagagagcaggtattgtgactatttgatgaatgaaaggaagaaaagagaaggaggaacggagaggctaaagggccctcagaccagctctgtgcttcttcccaggctggtcccaccccaccccagggaccataagtgagcacatgacccagacaaaaccaatcagagttccccgtcctaataacagtggccatgtgacccaagctgggccgcaagagcccgcaaggactcgagctggaatcactgggaagagaaactctctttgagctgctgttgaacccctgccaccatgtgaggcatgcaccccataagcccctcccattctccaagagtgaaatcagcactgcacagataaaagcagagcctgagatcagagaaagacctggtcctgaaatcatcatacg

SEQ ID NO: 5766 - DNA, 448 bp, Homo sapiens
  misc_feature 1..448: note = U/M: U (0.16:0.93) in Oligodendrocytes
  misc_feature 1..448: note = source = chr20:36502306-36502753; Gene: VSTM2L (Intergenic)
  source 1..448: mol_type = genomic DNA
cggccactgccatcaggccagagttgacatgctgggtgaaacctgtttgccatcccaggaagccaccgagaggtccctgaagaagatggcacctgctctgtgtccagccttgggctggtgacggaacagagagtaaggcaggccctgcctgctggtgctcacttgcagcctggcgggagaacaatgcataactgtaagcgtccccacagagaggggcaggagagcgcgacagggcctgtcacaggatcagatggcggtgccgtcactttgggtctaattcttccttgacttttctgtaactgtagtagctggcacatatcgaatgcccagtggcattgttatccccgatttatgcaagctgaggctgagggctcagagagggtaagtagctgcacaaggccctgtggccaacaagcatcagaacgcacattctagccaggcctgtccg

SEQ ID NO: 5767 - DNA, 327 bp, Homo sapiens
  misc_feature 1..327: note = U/M: U (0.12:0.88) in Oligodendrocytes
  misc_feature 1..327: note = source = chr20:37008012-37008338; Gene: LBP (Intergenic)
  source 1..327: mol_type = genomic DNA
cggctgcccctactgggaagtgaggagcccctctgcccagccgccaccccgtctgggaggtgtgcccagcagctcattgagaacgggccatgatgacaatggcggttttgtggaatagaaaggggggaaagttgggggaaaagattgagaggttggatggttgccgtgtctgtgtagaaagacgtagacatgggagacttctcattttgttctgtactaagaaaaattattctgccttgggatcctgttgatctgtgaccttacccccaaccctgtgctctctgaaacatgtgctgtgtccacccagggttaaatggattaagggcg

SEQ ID NO: 5768 - DNA, 474 bp, Homo sapiens
  misc_feature 1..474: note = U/M: U (0.12:0.88) in Oligodendrocytes
  misc_feature 1..474: note = source = chr19:7916744-7917217; Gene: EVI5L (intron)
  source 1..474: mol_type = genomic DNA
cggcttcgagggtggaaggtggtgtgcctgacatccctgatctgttcccatccactctgttcccctgaggtctccctaagggaccagaggaccccctaggctctgccagacacagtcaggggccagcagcctggccgcagggagacaggaggcccaggctgagccctgggagccccactgcccacctcctgcccccaaccccgcagatgccccaaagcctgatggcagatcatgactgactgaccatgagggcatccccaccctgccgcccagcctggtgagggcacaggagggagtttgggggtctaggcaacctcacgccttgccccgccccagcccggcctgcctggaggccctgctgctggccagcctgcctcccaccgctacttctctgctgtgcgggcccctgccccctccccgcgtcctccagctggtgcttcagggaagaatgcacaaaggccacggttgtgtccg

SEQ ID NO: 5769 - DNA, 484 bp, Homo sapiens
  misc_feature 1..484: note = U/M: U (0.2:0.93) in Oligodendrocytes
  misc_feature 1..484: note = source = chr6:15212742-15213225; Gene: JARID2 (Intergenic)
  source 1..484: mol_type = genomic DNA
cgtctcaaaaaaaaaaaaaggaagcctagcataaatagaatatgacaagttgttggaatacgggatagtgaggacaatctaattattcaagatggtatagaagaaaattttcaatacaacagtccaaataacagaggagctccaagaccaaactgaatactttctgtatttacagaagacagtcatagattcttttacagtgcagtatccaacgcaggctgagactgtttaacaatatgctttctgaagaagtaaaagaaagccgtgatttgttgcatttgccagtttgtgtggtataaatactcccattgcagccaatttcaaattaccaatgtgatgtcaaccagctcacaacatttctgaaaatttaacaattggttcttataaatgatctgagctattttcagctcacactgaacttagaatatactcagcaaaaagagataaatgatgacacttaaggaagatgaatctagtctaagcg

SEQ ID NO: 5770 - DNA, 317 bp, Homo sapiens
  misc_feature 1..317: note = U/M: U (0.19:0.91) in Oligodendrocytes
  misc_feature 1..317: note = source = chr2:3498878-3499194; Gene: ADI1 (Intergenic)
  source 1..317: mol_type = genomic DNA
cgttggccttgagatgagcaagatgaaaacaagtcgtagtttatccaccacccgatgctggctaactggccctgttccaccagccgtaactacagctttgatggaacaagagaccgatttcagtaacttcctctggacaagaataagcccatggatgggctctggccggctgatagaggctgagcactgggagccttcatgtccctgtttcacctttagaagtgcagagcctgcctgggatgcacgtagatgttaagtctcctctccaaggtgaacatgggttgtatgtaagtggatgtttgttcaatacacatgcg

SEQ ID NO: 5771 - DNA, 185 bp, Homo sapiens
  misc_feature 1..185: note = U/M: U (0.23:0.92) in Oligodendrocytes
  misc_feature 1..185: note = source = chr10:134549977-134550161; Gene: INPP5A (intron)
  source 1..185: mol_type = genomic DNA
cgttgacatccagaaggagccgtcctcggagaggggctgacgtcgcaaggagacaccccgagagccgggcttcccaaaacacggctctcaatgggcaccagggaggataccaccactgcccgcgaggcaggatcccagcacctgcctcaaaggctgtgtctgccgttcagtggagaccatggccg

SEQ ID NO: 5772 - DNA, 115 bp, Homo sapiens
  misc_feature 1..115: note = U/M: M (0.87:0.12) in Oligodendrocytes
  misc_feature 1..115: note = source = chr8:1765444-1765558; Gene: MIR596 (TTS)
  source 1..115: mol_type = genomic DNA
cgcatggcagctgctgcccttcggaggccgacccgacccatccctgggtgctgtctaggtcactgtccttgtgtgtttttgttttactttagaactcttataaagacacaaaccg

SEQ ID NO: 5773 - DNA, 351 bp, Homo sapiens
  misc_feature 1..351: note = U/M: M (0.81:0.06) in Oligodendrocytes
  misc_feature 1..351: note = source = chr8:1765080-1765430; Gene: MIR596 (promoter-TSS)
  source 1..351: mol_type = genomic DNA
cggggaaagccgtctgtaaccatccgagcctagatactccctgtttacctgcagacacacccaccgcacggcccaggaatacggccactgcggaagtcaagaggagactgctgcgttccctttgaaacagcccagggcggctcatcaaggctgcagaaaacattacagccccacaggcagggctgctccggccttcgtttagcagcttgattgaggcgtcattggcacacggcgaactgcgcgtcattaacgtgggcggttcagtgagttctgaggaacgcatagcaggtggatccgtcgccacagtcgggaaagcgagcacggcctctccgaagcctgcccggctcctcg

SEQ ID NO: 5774 - DNA, 288 bp, Homo sapiens
  misc_feature 1..288: note = U/M: M (0.75:0.03) in Oligodendrocytes
  misc_feature 1..288: note = source = chr11:126455766-126456053; Gene: KIRREL3 (intron)
  source 1..288: mol_type = genomic DNA
cgtgattggagttgggcttcagcttccctgtgctgcctgagacagaggagggagatgtttttcttggcaaataaatatgatatcataagccctggcaggattccagcctgagtaatggccgtctgccttcctaattccctcagcagcttggaacaggaacattactctttacttcctctctttaaaaacaaactctctattggagcgcattactcagccacaggatccctccccggacgtggcggcattcagatgatgggaggtgaggaatgagctcagattacagcg

SEQ ID NO: 5775 - DNA, 287 bp, Homo sapiens
  misc_feature 1..287: note = U/M: M (0.76:0.05) in Oligodendrocytes
  misc_feature 1..287: note = source = chr1:37945273-37945559; Gene: ZC3H12A (intron)
  source 1..287: mol_type = genomic DNA
cgccagccccttcccctttgcctttctcaggccccagtccctgaggtgtgtgtgaggactgaactttaatccggaacaatctggtttctcctcggtcagcccagccggtgcttcccccgcccccacccacgctgcaagaggcgagggaggggtggtgactcagtgtgcatgtgtacatctgtccctgtggtcccggcagctcgccgggtggggcaggaaccagaagtctcgcggcacctttcccccacccccaggtgtgttgcaagtggcctggccctcccccaccg

SEQ ID NO: 5776 - DNA, 218 bp, Homo sapiens
  misc_feature 1..218: note = U/M: M (0.77:0.09) in Oligodendrocytes
  misc_feature 1..218: note = source = chr4:41219007-41219224; Gene: APBB2 (Intergenic)
  source 1..218: mol_type = genomic DNA
cgcgcgctcattttataaatacgtaattggtttctgcatacctcatcatttcagtttacaaagaaaatcatttctcgtttcaccacttcatgcaatttttatatctattgtgagtgggtttttttcttcatgctgactcacccattaattgttttccaaggaaatgaaatatccaagaatattccaagagcatgttttttaaagcatggaagtaaacg

SEQ ID NO: 5777 - DNA, 198 bp, Homo sapiens
  misc_feature 1..198: note = U/M: M (0.88:0.23) in Oligodendrocytes
  misc_feature 1..198: note = source = chrX:25040201-25040398; Gene: ARX (Intergenic)
  source 1..198: mol_type = genomic DNA
cgtgcttctaaagacctgcaggattttaaagttataccaaggccaccaaaacacttactaggtagggcctagaaaggaagaatccaaaaatagtagcgacaacagctcccagagtcccttattttgcgatgtgtcttgctaattgggaagttcaacacgaggctttccctgcccatacaaggctggtatttcagagcg

SEQ ID NO: 5778 - DNA, 464 bp, Homo sapiens
  misc_feature 1..464: note = U/M: M (0.67:0.02) in Oligodendrocytes
  misc_feature 1..464: note = source = chr3:50638378-50638841; Gene: CISH (Intergenic)
  source 1..464: mol_type = genomic DNA
cgtcttggggcccttggaaggccatgacacttgtgttattaatcctgttataattttacctttcctggttagaactgaataaattaccccacctcacaccccccagcaaagttgggtcgggtgaatgagggacaggccctggtaagtggtcaaggacagggccctacttccctcaaggtcaccaggcctccccctggggcgtgtcctccacccgccacttctgagctggcaccaggcctgcccagccgcctgggacctgccagatcacgttgagcaaccagttcctgagaagcgttgaaggcagtgtggtttaaaattaactcccccgctccccctcccgcctgcggcctcctctgagttcttggaagcggcgctctgctcttcctgggaagaggcctccagccccagctgctgcaattctggcgaaaacacctcacccaggctgggggtggggggtgcccacg

SEQ ID NO: 5779 - DNA, 232 bp, Homo sapiens
  misc_feature 1..232: note = U/M: M (0.76:0.15) in Oligodendrocytes
  misc_feature 1..232: note = source = chr6:43423853-43424084; Gene: DLK2 (promoter-TSS)
  source 1..232: mol_type = genomic DNA
cggccctacccccaccacccttccctccctcaagtctcagcccttccaccccattcctttttgtgactgcctctgagaatcctttctggactgggaatgcccctgactctgtaaatgtgcacacaaaaccccctccaccgccaagtcttctcctgtaccccatcacgttcgtccttggcctcaggctaaacctcaactgcccaaacctggagctcagattcagagagtaacg

SEQ ID NO: 5780 - DNA, 285 bp, Homo sapiens
  misc_feature 1..285: note = U/M: M (0.65:0.06) in Oligodendrocytes
  misc_feature 1..285: note = source = chr9:135039351-135039635; Gene: NTNG2 (intron)
  source 1..285: mol_type = genomic DNA
cggagaaaacgatcctccgggatgcagcttcttactctgaaaatttccctgccgactcctcactctctgcgctcctcctcgttatccggggactcctgcctctcttcccccttctcttttttctttttggcagaacccgcctgcaatattcgtgtgctgagctcgtaattccccctgcgatgccagcaacgcccaattgattgactagttgtaaacacatttttcccctggcagattttgttgttgttagggttttttaaatttatttattttccagggaatgcg

SEQ ID NO: 5781 - DNA, 477 bp, Homo sapiens
  misc_feature 1..477: note = U/M: M (0.59:0.01) in Oligodendrocytes
  misc_feature 1..477: note = source = chr10:88471584-88472060; Gene: LDB3 (intron)
  source 1..477: mol_type = genomic DNA
cgggcggcggccaggcgcttgcggagagccgggcccggcccggcgtgagtcagaaatcaccttgtttaattacatatccccgagcccgccgagtgcgataggggacttttgaacttgccaattagagatgaaatatcaccttctaatttagactggcttaattccgtcacgcaaaaatagcaacagccccggggctgcgagatgggatatcaggtctctcctggcgtgacggcgagccaggctgaaggatgcagaagctgagggctgcgaagcgccactgcctgctcgccccccgacggagtcggggttgcgacgggggaacggagctgccgggccgggccaccgaggccggggaggttccttctctgggtgggttagccccaagcaaggaagccgtcaaatcggggtccagattctagcctgcctctgtgagacctctgtgttgtgggggctggaaaagaaaaggaggtggatccg

SEQ ID NO: 5782 - DNA, 484 bp, Homo sapiens
  misc_feature 1..484: note = U/M: M (0.57:0.03) in Oligodendrocytes
  misc_feature 1..484: note = source = chr6:35997057-35997540; Gene: MAPK14 (intron)
  source 1..484: mol_type = genomic DNA
cgtaaggatatggaaccacatagaaaaggaagggaagagatactttttagctttaatttacaccgtgagtgtgttttaaattaagtcgatagcatataatttccagacctgaaatatttcactaactgctctcttaacttccaaggttttataccctgtattttagattttctataatttgaaagctacggatcttaaactaagtatcagatttaactgttagctttttctgtgttttagtaattcgtattgtatgcgtcatttgaaaacgggcctgtaaaatcgtttttttgttttggaacaaattccaggcttttggatgtgttaatctttaaatatgatttctgtgtttcccaaagtcacatcatgaatttcctgtttggtagaatcttctgggtaattgagattgtgcaattgtgtccagcaacagatcatattgcattttctagttcaagttgcttaagttatgttgcagatagcaccg

SEQ ID NO: 5783 - DNA, 124 bp, Homo sapiens
  misc_feature 1..124: note = U/M: M (0.91:0.17) in Oligodendrocytes
  misc_feature 1..124: note = source = chr11:31831226-31831349; Gene: PAX6 (intron)
  source 1..124: mol_type = genomic DNA
cgaaagctctcaaattactccgactaattagccgggagaagaagtgatcagacgagggggaaggccaatgctttcatacagatttattttcaaggccttaccaagaaaaacataaggggattcg

SEQ ID NO: 5784 - DNA, 155 bp, Homo sapiens
  misc_feature 1..155: note = U/M: M (0.93:0.14) in Oligodendrocytes
  misc_feature 1..155: note = source = chr11:31829278-31829432; Gene: PAX6 (intron)
  source 1..155: mol_type = genomic DNA
cgaacccaaggagcaaaaccgagtctccctaaccagcaacacagcttccaaccaaatgtaccaacaacccaccaactcacaaagggaacagagggacgcttctagcttcataagccctgacccagtgcaggggtccccgaggctgctcccgtacg

SEQ ID NO: 5785 - DNA, 363 bp, Homo sapiens
  misc_feature 1..363: note = U/M: M (0.88:0.1) in Oligodendrocytes
  misc_feature 1..363: note = source = chr8:65291068-65291430; Gene: MIR124-2 (promoter-TSS)
  source 1..363: mol_type = genomic DNA
cgcattacaaagaaagatgacccagcccgcccttggactctcttttcccaaaatctcccaaccaaacccgcggtaacgttatcaaaggacacagagcccaggcatatctgtgtgtttatcttacaggcacacacgcatggttttctcttttatatgctagatttcatccctgacagcagaaaatgattggcaatggttatgacggagaacatgcaatagcgtggtccttaaaaacctgccattccttacaagtgccttagaaaggattcagggcgaaccaactgggttaattgcattcagtaaaataacacgattacaaaattagatctgtaccagaggggtaattaacttggatccacgccg

SEQ ID NO: 5786 - DNA, 84 bp, Homo sapiens
  misc_feature 1..84: note = U/M: M (0.88:0.16) in Oligodendrocytes
  misc_feature 1..84: note = source = chr11:31825751-31825834; Gene: PAX6 (intron)
  source 1..84: mol_type = genomic DNA
cgctccggatcatgcatggaaggctaattgaaaagatcagtcggggcgcttgtggcagccttgtcactttgtgacagtgctccg

SEQ ID NO: 5787 - DNA, 355 bp, Homo sapiens
  misc_feature 1..355: note = U/M: M (0.8:0.08) in Oligodendrocytes
  misc_feature 1..355: note = source = chr4:8868932-8869286; Gene: HMX1,HMX1 (TTS,exon)
  source 1..355: mol_type = genomic DNA
cgcgagaggggtagcacagccctccgggccggcctgctgtctgggtcccaggaaagggacgtttagtgttgggggcagtctgtggggacagtcaccgctcagccttggacagccggttcgtagttttcctttgttgcgctgggcttggcctgagggcagctgccccgggtggccatggccgaccgctcctcgctgaggccggggggtggccgtggcgccgggggctgcgcagcccagagtctctgcatggccccctgttcgagtggggatccagcctggcaaatgggtggggcgtcccattacattctagaggcgctccccacagaagctgaggcccgcccggccgcggcctgcg

SEQ ID NO: 5788 - DNA, 206 bp, Homo sapiens
  misc_feature 1..206: note = U/M: M (0.83:0.13) in Oligodendrocytes
  misc_feature 1..206: note = source = chr11:31824170-31824375; Gene: PAX6 (intron)
  source 1..206: mol_type = genomic DNA
cgtttacagtaagaaatgaagagagggcgttgagagtggagggccgcgggggcggcgagtggggcggcgccgggaggatcacctgcagaattcgggaaatgtcgcacggccgggccccgctgtgagctagctctacaatcttctgccgggtggagtccggcagtggccgcccgttgacaaagacaccaccgagctgattcactccg

SEQ ID NO: 5789 - DNA, 41 bp, Homo sapiens
  misc_feature 1..41: note = U/M: M (0.87:0.18) in Oligodendrocytes
  misc_feature 1..41: note = source = chr11:31826068-31826108; Gene: PAX6 (intron)
  source 1..41: mol_type = genomic DNA
cggccgggaccagcgcaagcagggactttgcggggacaccg

SEQ ID NO: 5790 - DNA, 221 bp, Homo sapiens
  misc_feature 1..221: note = U/M: M (0.74:0.06) in Oligodendrocytes
  misc_feature 1..221: note = source = chr8:65292442-65292662; Gene: MIR124-2 (TTS)
  source 1..221: mol_type = genomic DNA
cggtaaattaatttgtttggaagccagtgaggtggactatgttgaggtagcagttccgcaccacgactttggagccaaagaaaaacccaggccgaaaaagcgagccttgatgtctttgttctgccttggcctgcaggggttgggaacaaaggagaggagctaagaggatgcaccaaagtagccgcgccctccctgcctggcgctgtccgcggtgctgaccg

SEQ ID NO: 5791 - DNA, 260 bp, Homo sapiens
  misc_feature 1..260: note = U/M: M (0.81:0.13) in Oligodendrocytes
  misc_feature 1..260: note = source = chr8:65292680-65292939; Gene: MIR124-2,MIR124-2 (TTS,Intergenic)
  source 1..260: mol_type = genomic DNA
cgtaatcaaactggaaaagcaataggaccgtcccgtccctactcaaaagaagagtaggatattaggtaatttgaaaaataacatttaaaaagagaaaaaggtcacatacagcaaaacaatattttactgaaatcgttccctcaagctggttgctacccttgcctgacactttttggtcttcacgtaggaatgcacacatacatacattgtaagtgtatggggaaaccatttccactttatttaggctgaaacctaaatcg

SEQ ID NO: 5792 - DNA, 454 bp, Homo sapiens
  misc_feature 1..454: note = U/M: M (0.77:0.11) in Oligodendrocytes
  misc_feature 1..454: note = source = chr20:21498239-21498692; Gene: NKX2-2 (Intergenic)
  source 1..454: mol_type = genomic DNA
cggcctgtggacgccgggaggcctgcgcaggcccagctggcggccagggcaagtccggtgcccagagcacagtccagtgtctcctcaatttcttgggcccggcttgcgcccaaagagcctaggggccaggcgccaaacgcaccttttctgtcccaattaaacaggtgattgcatcctgaggactccccaagaggcctccccgagagtaccacagctaggccttctagagcccaggagctttggttctctgcgatcccgcacacccgcaggctgagaggccctgccccgctcccttccccctccggagggttcttcagtaagggcccaccactcccaccctgtcagcgtctgcctgcaccagtttcagctcctggtctcccccactcggcattctttagtaaattctttccaggtaccgtcttgcacccaagcgagttcaatgtcctccgttccg

SEQ ID NO: 5793 - DNA, 288 bp, Homo sapiens
  misc_feature 1..288: note = U/M: M (0.72:0.07) in Oligodendrocytes
  misc_feature 1..288: note = source = chr20:21497889-21498176; Gene: NKX2-2 (Intergenic)
  source 1..288: mol_type = genomic DNA
cgcaggacgcctcctggactccggcccctcctacactttcaccccagcgagtcttccagtttttatttcccctggcctgggggcagctgggcagggagggagagaattggagagagcttcggccttgcctcctccgcgatcggtgcttccgggtccacagcactcagcctctcccgggacctcgagactcatttccccatcacttctcgtccgtgtggttcccgcgtccatttccagagcgttaacatttgcaattgaaaaggcgctgggagaccgctgggaggtccg

SEQ ID NO: 5794 - DNA, 455 bp, Homo sapiens
  misc_feature 1..455: note = U/M: M (0.76:0.11) in Oligodendrocytes
  misc_feature 1..455: note = source = chr11:31824580-31825034; Gene: PAX6 (intron)
  source 1..455: mol_type = genomic DNA
cggcggtcagttccctgctatcgatcaaataaaggacaacaggaccaccagccatgccagacatcgggcagcccagtccaagcaaccgtgcccctgcccactgtactgcagcagcaacacagagtcagacacatgccaaggaacaagtacacatggacctcactacagccataaccccagcagtgtccccagcccactgcccctcttcataaacactgcagccagcctctgaacccacaaagcgctaagaaccggctctataaatctcccaaagatcccctctgagtgtcaccgcaaaccatgggttctacagatcccacactgaaccttcaaggtctctgcagtgttgggacagtgatagcaaaccttacagcccttgagtgctcccttagacgctaaaatccagaaatgtttccatcaccgtccaaactggccaaggcctggcacaagcatcg

SEQ ID NO: 5795 - DNA, 224 bp, Homo sapiens
  misc_feature 1..224: note = U/M: M (0.73:0.1) in Oligodendrocytes
  misc_feature 1..224: note = source = chr4:8870018-8870241; Gene: HMX1 (intron)
  source 1..224: mol_type = genomic DNA
cgccctccgcacggcccatctcctcgcccgtctccggtgagtcccggtcgctggctgcaggggagagagggcaccaccgttggttctagggcactgattaccagactcaatcactgaggccagccgtccccaccttgaggtcgctcacagccacaagcaggaagaccttccagcacagggctgggcacccagcagctctggggatgcacacattgtcagaaccg

SEQ ID NO: 5796 - DNA, 419 bp, Homo sapiens
  misc_feature 1..419: note = U/M: M (0.56:0.1) in Oligodendrocytes
  misc_feature 1..419: note = source = chr20:21500838-21501256; Gene: NKX2-2 (Intergenic)
  source 1..419: mol_type = genomic DNA
cgggaaccccattgatgccacggagagaactgatcctgggacctagagcctggagtccccctgcgattaactgtggatgcaggaggaaggcatctaggtgagctcccttctccctattctttttcaaggcaaaatatacaacactttcccaattatctgcctccctcccaccacaaaaggggcacatatctcccaaggatgtaaatagtaatagaaattagtatttgtctttctattaatcagcttcattgtgtgggcataagaccctgcgggcatatgttaggactttgataaatgcactttaatgagatctttaaaaatgcatccaataaaataaaaggcgaggaaagccgtttaactttcatggatgttaaattgaacacgaactgtggctccgggcacgctacaaaatggaaccg

SEQ ID NO: 5797 - DNA, 145 bp, Homo sapiens
  misc_feature 1..145: note = U/M: U (0.08:0.89) in Neurons + Oligodendrocytes
  misc_feature 1..145: note = source = chr18:52721860-52722004; Gene: CCDC68 (Intergenic)
  source 1..145: mol_type = genomic DNA
cgcacttgctaattgtcttcaattggcagactccaccgactttggcgctgcgacactggttgccacagtctttgccgctcgtagtcgctagcctggcgttcttggaagcggcctccattttgggcgggctgcgttcatccgcacg

SEQ ID NO: 5798 - DNA, 247 bp, Homo sapiens
  misc_feature 1..247: note = U/M: U (0.08:0.88) in Neurons + Oligodendrocytes
  misc_feature 1..247: note = source = chrX:70367594-70367840; Gene: NLGN3 (exon)
  source 1..247: mol_type = genomic DNA
cggaacatgtggctgcggcttggcccgccctcgctgtccctgagccccaagcccacggttggcaggagcctgtgcctcaccctgtggttcctcagtttggcgctgagggccagtacccaggccccagcacccacagtcaacactcactttgggaagctaaggggtgcccgagtaccactgcccagtgagatcctggggcctgtggaccaatacctgggggtgccctacgcagctcccccgatcggcg

SEQ ID NO: 5799 - DNA, 101 bp, Homo sapiens
  misc_feature 1..101: note = U/M: U (0.11:0.88) in Neurons + Oligodendrocytes
  misc_feature 1..101: note = source = chr7:158159035-158159135; Gene: PTPRN2 (intron)
  source 1..101: mol_type = genomic DNA
cgggagaagccacagcccaatgcacgcgtgcaaacgcacacacacccacacacccacagcatccctgggagaagccacagcccaatgcacgcgtgcacacg

SEQ ID NO: 5800 - DNA, 151 bp, Homo sapiens
  misc_feature 1..151: note = U/M: U (0.06:0.83) in Neurons + Oligodendrocytes
  misc_feature 1..151: note = source = chr8:9260354-9260504; Gene: LOC157273 (Intergenic)
  source 1..151: mol_type = genomic DNA
cgccgccgcctcacccagcagacaatgctgatgtttgtgctgtcaccagtgggcttgttcgtaataatatcaacctcttttaaaattaagggaaggcaaatgaatatttattctctgtagtcaggctgtgtggcacttcgtggctgaaccg

SEQ ID NO: 5801 - DNA, 252 bp, Homo sapiens
  misc_feature 1..252: note = U/M: U (0.06:0.83) in Neurons + Oligodendrocytes
  misc_feature 1..252: note = source = chr1:2006365-2006616; Gene: PRKCZ (intron)
  source 1..252: mol_type = genomic DNA
cgtgggcctggggagactgggctgctgaaggtggggactgggctgctgggggaggcggctttccctctcggggggtgctggctgctggggaggctggcagcgcgcccctcccccaggtgcgaagggacctcagcagacgcagggctgctccgcacagccagcttgggccgcaggggtccttgagtgatgaagattctgtgttgatggggtgagtgggagagagacggagctggggtggttttcacacgtgcg

SEQ ID NO: 5802 - DNA, 66 bp, Homo sapiens
  misc_feature 1..66: note = U/M: U (0.11:0.87) in Neurons + Oligodendrocytes
  misc_feature 1..66: note = source = chr4:184829257-184829322; Gene: STOX2 (intron)
  source 1..66: mol_type = genomic DNA
cgaccgcatttccacgaacataaagccgaaataaaagaaccatcttttttattgcaaagtcaggcg

SEQ ID NO: 5803 - DNA, 450 bp, Homo sapiens
  misc_feature 1..450: note = U/M: U (0.13:0.89) in Neurons + Oligodendrocytes
  misc_feature 1..450: note = source = chr17:27909733-27910182; Gene: GIT1,GIT1 (intron,exon)
  source 1..450: mol_type = genomic DNA
cggtgactccatcatcgtcccggcagggaagcttgtgcacaaatgccagcatctggtacttggccctgatgaactctgacttgatggggctgcatggggcacacaggaggaatggggagcatggtgggagagggtggtcaccttgccacctcccagggccctgtcccggactgcgcagtctctgcccaccacccctccagccccactcactggactttgtcttgggggttggctttacgccggccgctctgcacttgtgcggggtccagcagggagtgctcccagatggagttggccccgttgctggcaagcgtgtgcaccatctgcagggaagagatgccaagtgagagagtgcccactgcgtgctaagcaatgggggaaacacttcctgagcgcctgctgtggctggcgtagctggaaacggtaccaagggggcctactgtgtgcccg

SEQ ID NO: 5804 - DNA, 62 bp, Homo sapiens
  misc_feature 1..62: note = U/M: U (0.06:0.81) in Neurons + Oligodendrocytes
  misc_feature 1..62: note = source = chr19:51052053-51052114; Gene: LRRC4B (exon)
  source 1..62: mol_type = genomic DNA
cgggcggcagcggggggcacggggagccgcgggcacgcgccatcctcaatgttcatgctccg

SEQ ID NO: 5805 - DNA, 93 bp, Homo sapiens
  misc_feature 1..93: note = U/M: U (0.18:0.93) in Neurons + Oligodendrocytes
  misc_feature 1..93: note = source = chr8:27603240-27603332; Gene: CCDC25 (intron)
  source 1..93: mol_type = genomic DNA
cgcgttccattcccggcactgcagccctgtgccacgttcttctgtcttctgcagcatgtgacagaaagttgtctgtgtggcacacggttaacg

SEQ ID NO: 5806 - DNA, 402 bp, Homo sapiens
  misc_feature 1..402: note = U/M: U (0.12:0.87) in Neurons + Oligodendrocytes
  misc_feature 1..402: note = source = chr9:124846277-124846678; Gene: TTLL11 (intron)
  source 1..402: mol_type = genomic DNA
cgaagttatttatacataatctaagatgtccaaaaaatggtccactgttgttttttaaaattccaataacccacagttctgacacaatgagaaatagaatctccctatgagtataaagaacaaaataggaaaactggccttcatcagagttctaggcagatgtactgaggaacttatttgaaaagcaaaaccgcacccagggaagactacacaggagataaactgcctattcttccagcttcattaagggtgcgaaggttttattcagatgacagagaagcatatgggagagggaaggaagccgccagaaatgcctgcaagtacttataaagcatttataaaaattactagataatggttcagaaacacccagggaaacaaacacgcatgcaaatggcagcg

SEQ ID NO: 5807 - DNA, 90 bp, Homo sapiens
  misc_feature 1..90: note = U/M: U (0.19:0.93) in Neurons + Oligodendrocytes
  misc_feature 1..90: note = source = chr12:20025836-20025925; Gene: LOC100506393 (Intergenic)
  source 1..90: mol_type = genomic DNA
cgcccactactgtttccaaacagccgccacaccgctcatgaaatcatccttgcacctgctcatgcggtgtgcatctgtgctttgttggcg

SEQ ID NO: 5808 - DNA, 217 bp, Homo sapiens
  misc_feature 1..217: note = U/M: U (0.07:0.81) in Neurons + Oligodendrocytes
  misc_feature 1..217: note = source = chr13:113698606-113698822; Gene: MCF2L (intron)
  source 1..217: mol_type = genomic DNA
cgggggtcactgcctcgtcttcatgtcttgggagttgctgtttctgtctttaaatccgagcgtcagaaggatctgagacacccgatataaatccctggcttgttaatgatgctcacagagagcggccacgcccatagactgcataatttatctccatcctgcagaattctgattttcatgtaaacctaggacatgttcagagacttggaagttagcg

SEQ ID NO: 5809 - DNA, 200 bp, Homo sapiens
  misc_feature 1..200: note = U/M: U (0.17:0.9) in Neurons + Oligodendrocytes
  misc_feature 1..200: note = source = chr19:4357207-4357406; Gene: MPND (exon)
  source 1..200: mol_type = genomic DNA
cgttcaggcccctgtgcccgctgagctgcgcctctgtccccagatctaccagagcctgttcctgcggggcctgtccctggtgggctggtaccacagccacccacacagcccggcgctgccatctctgcaggacatcgacgcacagatggactaccagctgcggctgcagggctccagcaatggcttccagccctgcctcg

SEQ ID NO: 5810 - DNA, 272 bp, Homo sapiens
  misc_feature 1..272: note = U/M: U (0.2:0.93) in Neurons + Oligodendrocytes
  misc_feature 1..272: note = source = chr1:160062107-160062378; Gene: IGSF8 (intron)
  source 1..272: mol_type = genomic DNA
cgggcactgcccgcctggtaccagctgtagtcggcatgctgcacccaggcgctgggggcacagtggtacacgccttcatcctcgggccccaagctgtgtagtctcagccgatggcttcggggccccaccagctctacgctgacagggcctcctccaggccggactcccagctctgccacaccatcctggcctacgccacccaccagctgggcagggacagagctgagctctccgtcctctggtcgctccacccaccagctggcggccagccg

SEQ ID NO: 5811 - DNA, 438 bp, Homo sapiens
  misc_feature 1..438: note = U/M: U (0.11:0.84) in Neurons + Oligodendrocytes
  misc_feature 1..438: note = source = chr10:77211693-77212130; Gene: ZNF503-AS2 (Intergenic)
  source 1..438: mol_type = genomic DNA
cggtgaggtggtgctgtgctggatagtacatttgggggttatatgtgcatgctaatttgctcaattctgtgccgttggcttggtgtaagaagtgggcatgttttccttggttcagtcccacttggtcttgttatgcctttttctttcagtacccaaggaagggacggaggaaagaagtggccagcgttgttggagaggtcaagggaggggctccagtgcagaccctctgctcacttcctccttcactacacttcaggatttgcctggggtcctgggctgtcacactcctgaggctgcgtggaaagtttttgttggcgtctcgatgcccatttattttgagctggtttattctgtgctgcctggagccctggttagtggtgtttatcgcgcgtctctgttctttgttcacccttttcaacgtgattgctgttcacgccg

SEQ ID NO: 5812 - DNA, 455 bp, Homo sapiens
  misc_feature 1..455: note = U/M: U (0.12:0.85) in Neurons + Oligodendrocytes
  misc_feature 1..455: note = source = chr2:74612706-74613160; Gene: DCTN1-AS1 (promoter-TSS)
  source 1..455: mol_type = genomic DNA
cgccggccactccccaaaagcagagcattccatcctttctctttttaaacccacgtcatcatctgatcataatggaaatcaatctcctcaaaccaccatgcaaaggcgtatccatggcaacctcaaaaggaaggacacagagatgatgcttcagtggctgcagcaggaaaaggtaagtccgtttctcttccatccacgccatcccatcactctctcctttcactcaagtcaggtatacagcttacctacaaattgtatctgtcacacaaactgagaaaacacataaggtgagttaataatcattatgttattatataaggttttagatctgcctgtctctctgccaagaaaaaattctccttttctaggtgataggaacagggacaaggtctctcttcttattcacctctcagatgacacaatctcagcccacaatacctgacaaatcactatcg

SEQ ID NO: 5813 - DNA, 225 bp, Homo sapiens
  misc_feature 1..225: note = U/M: U (0.19:0.91) in Neurons + Oligodendrocytes
  misc_feature 1..225: note = source = chr15:22996654-22996878; Gene: CYFIP1 (intron)
  source 1..225: mol_type = genomic DNA
cggtttctgtgcattgtcatggcaacagttggccctctgttggcttctggatggagtgtgatgctgcattagaaacagggaaagagaagcggagcagatggtgtctggccggcgtctggcactggattgacgttgatgagtacggaaaagtctgcctttcttcctcttggtcttagttttgccatcatctctgggaggtcctcagaagttaaaatctcattgtcg

SEQ ID NO: 5814 - DNA, 279 bp, Homo sapiens
  misc_feature 1..279: note = U/M: U (0.15:0.87) in Neurons + Oligodendrocytes
  misc_feature 1..279: note = source = chr8:26446533-26446811; Gene: DPYSL2 (intron)
  source 1..279: mol_type = genomic DNA
cgccaggctgtttttctggtgcagctttcattgtgccgccttcttcctctgaagccttcagtgactccctcttgctcagagaatcagcccaagtgtcagaaccctccacgacgcggcctattcctgctgccccagcccagacttgcattgtcatctcagccagggatgccctccctttctttccctgcttctagaagcttcatcacccttggtggcccagcctgggtgcttcccattcactgatctcctgtgatctgtggctgctgtgtggcctcttcg

SEQ ID NO: 5815 - DNA, 477 bp, Homo sapiens
  misc_feature 1..477: note = U/M: U (0.08:0.8) in Neurons + Oligodendrocytes
  misc_feature 1..477: note = source = chr12:49578469-49578945; Gene: TUBA1A (exon)
  source 1..477: mol_type = genomic DNA
cgtcacttcctaggatatgtataaaccacaggcaacacttattttttattctcaatgcactaaatacatgaaaaacttcagacacccagatagaaaacacaggactgaattcatttaagacagggaatactttattcaaaacccatcacagaaatggacagcttgggtctgtaacaaagcattcatgttttagagcataggtcagtaattgtatatgagagcatacactgctacatacaaattaactgatcagaccacaacttttcaatgtttaaaacagaataagcttccctgtaaaagcagcacctttgtgacgttttaactttagtattcctctccttcttcctcaccctctccttcaacagaatccacaccaacctcctcataatccttctcaagggcagccatgtcctcacgggcctctgaaaactcaccttcctccatcccctccccaacgtaccagtgaacaaaggcacg

SEQ ID NO: 5816 - DNA, 199 bp, Homo sapiens
  misc_feature 1..199: note = U/M: U (0.16:0.87) in Neurons + Oligodendrocytes
  misc_feature 1..199: note = source = chr5:179711246-179711444; Gene: MAPK9 (intron)
  source 1..199: mol_type = genomic DNA
cgctgcctccacttcccacaccagccggtgctggttcctccccctcagctcccaggctgtgctgccaccatccgtccagcacagggctccctccttgccacttgtgcactcagcagcgcccgccaggctgcactgtcacagcctttgtagggtctgcctcccttccaggctatgagcaactcaaaactgggagggaacg

SEQ ID NO: 5817 - DNA, 318 bp, Homo sapiens
  misc_feature 1..318: note = U/M: U (0.2:0.91) in Neurons + Oligodendrocytes
  misc_feature 1..318: note = source = chr11:63831218-63831535; Gene: MACROD1 (intron)
  source 1..318: mol_type = genomic DNA
cggtcctcgcccggctgtcagccagcaatcatgcctaataaaggccccaaatgagacagccgaacaggagcaccttcactctaacaatgcaattagcacagacaatgcctcccgctttctccccagccccagagagggtggtggagggggaccagccgggccctccccagtgagctgcggagaggtttgaaaggaaccagtgatagactaagaggtgacaatgaatcgcatccgagtgacggctcctcttgtcaggcagccgcagggagagagcgcatcttcactggatctttgtaggttagccagctttgaacagcg

SEQ ID NO: 5818 - DNA, 60 bp, Homo sapiens
  misc_feature 1..60: note = U/M: U (0.15:0.85) in Neurons + Oligodendrocytes
  misc_feature 1..60: note = source = chr19:2633340-2633399; Gene: GNG7 (intron)
  source 1..60: mol_type = genomic DNA
cgactgtcaccgccgtgtgtattttgagtcaaaggcggccaaggctcgatgaatctgccg

SEQ ID NO: 5819 - DNA, 130 bp, Homo sapiens
  misc_feature 1..130: note = U/M: U (0.2:0.9) in Neurons + Oligodendrocytes
  misc_feature 1..130: note = source = chr11:63451515-63451644; Gene: RTN3 (intron)
  source 1..130: mol_type = genomic DNA
cggggttcaaatgattctcatgcttcagccacccgagtagctggaattacaggcgtgtgccaccacgcgtggttaattttcttttggtttttttttttttttttttttttttggttttttttttgagacg

SEQ ID NO: 5820 - DNA, 184 bp, Homo sapiens
  misc_feature 1..184: note = U/M: U (0.15:0.85) in Neurons + Oligodendrocytes
  misc_feature 1..184: note = source = chr4:2979318-2979501; Gene: GRK4 (intron)
  source 1..184: mol_type = genomic DNA
cggtcagggagggagtgggtgagtagactgtgctttgtgcagtcattgaggattccaggctggcagaagttctgagtcatcagcacatggctcccaagatcctcctgtggatctcggtccatctacgaaacaaagaagcgagagagcacggagaaccgtgtgggagattcttccaggccaggcg

SEQ ID NO: 5821 - DNA, 323 bp, Homo sapiens
  misc_feature 1..323: note = U/M: U (0.1:0.8) in Neurons + Oligodendrocytes
  misc_feature 1..323: note = source = chrX:70368045-70368367; Gene: NLGN3 (intron)
  source 1..323: mol_type = genomic DNA
cgacggaggatggtgagtgctgcggccaggcactgtgccctccctgcctcccgcctgccctgctgtgtttgtggcttgcatgtggttgtgtgccctgcagcatgcatctgtctgtctgtgaaaatgcttctaaccatcactctgcttggcctcccacccccctccctgttcttccctctcccagcattgtccgagctcccatgtgtgagtgacactgttgccaggaggggcctggcccggcctgagagctctgacgggtctcggtccagtgctggatgggggtcccctgggggagtatgggtcacggctggcagctacccgcg

SEQ ID NO: 5822 - DNA, 64 bp, Homo sapiens
  misc_feature 1..64: note = U/M: U (0.15:0.84) in Neurons + Oligodendrocytes
  misc_feature 1..64: note = source = chr22:45605441-45605504; Gene: KIAA0930 (intron)
  source 1..64: mol_type = genomic DNA
cgctctctctgtcctacaacccgcccgccagatgtcaccttctgcactccccccaccaccgccg

SEQ ID NO: 5823 - DNA, 138 bp, Homo sapiens
  misc_feature 1..138: note = U/M: U (0.14:0.83) in Neurons + Oligodendrocytes
  misc_feature 1..138: note = source = chr18:56532983-56533120; Gene: ZNF532 (intron)
  source 1..138: mol_type = genomic DNA
cgatcaaggcgaaatctgaatgccttcattaaatcgcatgtgtctgggcaattgggagagtcaggcctggaaggaagcgagtgtggagaatggtaggcgtcagggccttgtggagaatgtgctgttttgcataagacg

SEQ ID NO: 5824 - DNA, 174 bp, Homo sapiens
  misc_feature 1..174: note = U/M: U (0.16:0.85) in Neurons + Oligodendrocytes
  misc_feature 1..174: note = source = chr11:45923416-45923589; Gene: MAPK8IP1 (intron)
  source 1..174: mol_type = genomic DNA
cggggtggacacagcaaatggccctagggatggcctgagggggcagggccggggcctccctgtgccgggcactgttgaccacttccatcacaagagccttttgttccctgcacaggacacactgaataataattctctgggcaaaaagcacagttggcaggatcgggtgtctcg

SEQ ID NO: 5825 - DNA, 259 bp, Homo sapiens
  misc_feature 1..259: note = U/M: U (0.18:0.87) in Neurons + Oligodendrocytes
  misc_feature 1..259: note = source = chr2:74232167-74232425; Gene: TET3 (Intergenic)
  source 1..259: mol_type = genomic DNA
cgggctggcaggtttgtttactcccgaaagcacccccttccgctgtagtgatggctctccctggcagacccgcttctcttcagctctttccaagtgtgttctccgtgtctccctgcctgctggccccagatagaggctggttttccgcagtcctgctggaagctcccagcctaatgccccagccttagtgttgtggacatgtggcaggggctacttgaaaatccagaggaagccttcctaacaagtctttctccttccg

SEQ ID NO: 5826 - DNA, 318 bp, Homo sapiens
  misc_feature 1..318: note = U/M: U (0.12:0.81) in Neurons + Oligodendrocytes
  misc_feature 1..318: note = source = chr16:1762773-1763090; Gene: MAPK8IP3 (intron)
  source 1..318: mol_type = genomic DNA
cggggtttatctggctagttcccgtctctgccggattcgctggtgtctgcctccgcagtgcacctgcagagaagcccccatcacccactctgccgcccctgcctggggagctgggcccccaccaggcctctctcccggcttccgcaagttaagctgctccctgccaacaaggggccggcaccctttggttcattcagcctgagcctgttgtttccttttctcggcacacccggagatgctggccatctgtgtgtgtggataaagggaagccggctttcctctgtctctgcacacatctcaccaaactgtgcagttccg

SEQ ID NO: 5827 - DNA, 67 bp, Homo sapiens
  misc_feature 1..67: note = U/M: U (0.21:0.89) in Neurons + Oligodendrocytes
  misc_feature 1..67: note = source = chr11:20782466-20782532; Gene: NELL1 (intron)
  source 1..67: mol_type = genomic DNA
cggcccaacatctctaaatgcgcagcttctcagagtgccaaaagccgctattgtgtgctgtcccgcg

SEQ ID NO: 5828 - DNA, 92 bp, Homo sapiens
  misc_feature 1..92: note = U/M: U (0.08:0.76) in Neurons + Oligodendrocytes
  misc_feature 1..92: note = source = chr13:25744404-25744495; Gene: AMER2 (exon)
  source 1..92: mol_type = genomic DNA
cgggtccctgctcctcggtctgggagagcatgtcccagaactcctgtagataggtgtcgtccacctcgtccgggctggccatctcttccccg

SEQ ID NO: 5829 - DNA, 198 bp, Homo sapiens
  misc_feature 1..198: note = U/M: U (0.2:0.88) in Neurons + Oligodendrocytes
  misc_feature 1..198: note = source = chr14:97129256-97129453; Gene: VRK1 (Intergenic)
  source 1..198: mol_type = genomic DNA
cggcattattaattcactagaaatcccagggaggaatgggataggcttttagcctagctggaggacttaacgataatgctttgcaacacgcacaaacttttttaaagctgacttttctttgggagtcgctttctgggtaattttcctcttttaagaacatttcgccgtggcccggattcccgcggagctggtgggacg

SEQ ID NO: 5830 - DNA, 218 bp, Homo sapiens
  misc_feature 1..218: note = U/M: U (0.14:0.82) in Neurons + Oligodendrocytes
  misc_feature 1..218: note = source = chr16:73363089-73363306; Gene: LOC100506172 (Intergenic)
  source 1..218: mol_type = genomic DNA
cgaaccagattcacctctggtgtttcattgtggattccacaattcatcacgctcttggcaagtggtggtgctccacatggtggggagcacgggggagggatctcaaggattttaggcagtgggcggtgttgaggaaatatcttcctaccctttccaccctcttgcttgtgtcgactatattttcgagtttcactcaatgatggagttgtttcttagcg

SEQ ID NO: 5831 - DNA, 340 bp, Homo sapiens
  misc_feature 1..340: note = U/M: U (0.19:0.87) in Neurons + Oligodendrocytes
  misc_feature 1..340: note = source = chr4:176732188-176732527; Gene: GPM6A (intron)
  source 1..340: mol_type = genomic DNA
cgatggtcctttattacgtgtgtgtgtgtgtgtgtatgcaccatatatgcctcaaagtatgtgtgtgtacattaagagaagaaacccagcatagctaaatggctaaaaatatggtaactatactgtgcttccaccctatatattttatcacataaaatacagttttttacgataagtgcctttatatacatttgaaattaactttgacagctgaatctttttcaacactactcttgaatattacctttatgtagtattacctgtgttactgcttcagtactaagaaaatgagaccattttctctgacattacataagcccgacagcagacgagagaaacg

SEQ ID NO: 5832 - DNA, 386 bp, Homo sapiens
  misc_feature 1..386: note = U/M: U (0.1:0.78) in Neurons + Oligodendrocytes
  misc_feature 1..386: note = source = chr5:87951971-87952356; Gene: LINC00461 (intron)
  source 1..386: mol_type = genomic DNA
cgaatggcaaaatgctcactatattaaacaacaaaaaaagaaatggtagctttttatgggactaatcgctaagcagatgcatgtaaatgagctattttctatgcatggcttccaaaagtgctaattaaatagttggtattcaaggctatgctcgctcattgtttagtgacacacaaatccagcgatgtgtgccagcagacattttaagttgaatgttttctcctctacggtctttgtcatgaaatggtggcaccatgatgagaacactagtgtaagcaaaacattgaaatatgctttaataatgttttaaccatgtagtgacactagcctagttttctaatgaatttttaatttctgttttcttataagggtgatatgagttatcg

SEQ ID NO: 5833 - DNA, 100 bp, Homo sapiens
  misc_feature 1..100: note = U/M: U (0.21:0.88) in Neurons + Oligodendrocytes
  misc_feature 1..100: note = source = chr17:64949606-64949705; Gene: CACNG4 (Intergenic)
  source 1..100: mol_type = genomic DNA
cgccccttggtgcccgcagtcccaggagccgagcacggggctcctggctgcagccgcagaaaggccctcttgctgggatcccactacaaattgatgaacg

SEQ ID NO: 5834 - DNA, 268 bp, Homo sapiens
  misc_feature 1..268: note = U/M: U (0.2:0.87) in Neurons + Oligodendrocytes
  misc_feature 1..268: note = source = chr18:34887267-34887534; Gene: CELF4 (intron)
  source 1..268: mol_type = genomic DNA
cgctctgtgatgaatggagcctgtgtcactcagcgaaaatgaatatttctttgtgataatggccagatggtagcaactctccgatccaaattaaaacatgcatgataaatgccaggaaaacagaggaagacaaaaccccaacctggagtgaattctctctataaatcttccccccgtcccccgctcccccaccaccacagcggccctgctaatagccattaaattattaagatgtgccacaaggagaatgccaatgtcagtggcatcg

SEQ ID NO: 5835 - DNA, 303 bp, Homo sapiens
  misc_feature 1..303: note = U/M: U (0.2:0.87) in Neurons + Oligodendrocytes
  misc_feature 1..303: note = source = chr11:6435640-6435942; Gene: APBB1 (intron)
  source 1..303: mol_type = genomic DNA
cggtgtcttattcaatttcacattcccattaccaaagagagtgtgccgtgtgccgacacagactgggctgttgcagaaggaaaggacggatgaacgggacagacacagggggtgggaggatccaggaagctcagaactggctgggaataaataccaagaaaggctgtgtggcccaatgggctggggaggagcaaagggagtgtttgggagggtgtcagagaatgccaaagggtccctgagtgggaagtaagatgggacaggaatcctggagaggtgagggctgagatctaggaaaagggagcg

SEQ ID NO: 5836 - DNA, 341 bp, Homo sapiens
  misc_feature 1..341: note = U/M: U (0.15:0.82) in Neurons + Oligodendrocytes
  misc_feature 1..341: note = source = chr4:176728591-176728931; Gene: GPM6A (intron)
  source 1..341: mol_type = genomic DNA
cgattgcaaagaatagagattcacccagagtagctgaaagatggggcagcatagttattattaaaatttgccgtgggataaagagatcctcagagcatactgagagtcatcttttccccgttctcaagaaagaaggccaattgaaccaattcatctttttggattcaattcacgacttacaagtcgtagattgctagtgcacttacagattggctgcccttgaaaaagttttcatatctggcaaagaaaagaagccagagttggtggtaaggaacacaaccataaattgcagatcatagctgatgactgcaatggaagcatgtgggggaggcagtccttcg

SEQ ID NO: 5837 - DNA, 442 bp, Homo sapiens
  misc_feature 1..442: note = U/M: U (0.18:0.85) in Neurons + Oligodendrocytes
  misc_feature 1..442: note = source = chr11:19887608-19888049; Gene: NAV2 (intron)
  source 1..442: mol_type = genomic DNA
cgtaatacttgctaaaaccaacaccatccaaagaattgagtgccatgctggcacagagcagacatctacacaatgatgttgactgaatgaatgcttgaaataatcctataactcagggcttctcaatctcagcactgttgatgttttggactggacagttctttgttgtgagaagctgtactgtgcattgtaggatgtttagctacatcttggcctctatccataagatgcgagtagtaccctgctcccattgtgacagccccaaacgctgccagacattgacaaattggtccctcacctccaccctccatccctagccagtggagaactactgatcaaaattataaaattctgggaaaaaaatgacaggactttaaaaagttaacaaagaagaagtattcgggtaacttatttataattattcattcttttaatagaatcg

SEQ ID NO: 5838 - DNA, 246 bp, Homo sapiens
  misc_feature 1..246: note = U/M: U (0.26:0.92) in Neurons + Oligodendrocytes
  misc_feature 1..246: note = source = chr7:138603863-138604108; Gene: KIAA1549 (exon)
  source 1..246: mol_type = genomic DNA
cgtggagtggtccagtgagtatctggcagaaagttatccatctcatcgtcattgacggccacctctttactcgtcactgacacgtaagttgccacaaagatgctgggatctgctgtacttttggtctgttttccttggttaaaaaaggctgtatcaaaagtagtggcagacggcggggctgtgacatggagaggactgctgtgctgggagccgggagcagtttctgttaaggccacttgtgcagcg

SEQ ID NO: 5839 - DNA, 279 bp, Homo sapiens
  misc_feature 1..279: note = U/M: U (0.24:0.9) in Neurons + Oligodendrocytes
  misc_feature 1..279: note = source = chr6:157493920-157494198; Gene: ARID1B (intron)
  source 1..279: mol_type = genomic DNA
cggagccttttttaaagctttttttttttttcttggcacataacgctacatgtgtcccgccttggttgagccagcactttcatttgcagaatgtagaatgggccctgttcatcaaacctcaggtttattttcatttgaaataggcctggtttctggttcttcccactcatgtataaggctcatcattctctcccgtctctctccttccctctcttcctcactctgactcttcacatctggttggtgcctcactcgcagcccctgcagcccagtgttgcg

SEQ ID NO: 5840 - DNA, 30 bp, Homo sapiens
  misc_feature 1..30: note = U/M: U (0.22:0.87) in Neurons + Oligodendrocytes
  misc_feature 1..30: note = source = chr19:2633452-2633481; Gene: GNG7 (intron)
  source 1..30: mol_type = genomic DNA
cggttgcttagcaacaggcgcgcgcgcgcg

SEQ ID NO: 5841 - DNA, 140 bp, Homo sapiens
  misc_feature 1..140: note = U/M: U (0.24:0.89) in Neurons + Oligodendrocytes
  misc_feature 1..140: note = source = chr4:58050932-58051071; Gene: LOC255130 (intron)
  source 1..140: mol_type = genomic DNA
cgcttaaacaaccggcgccaattcacagtgaaaaaagatctgctcaaagctggtttcagaaggaggacacgggaggcgtataatatcgagcccgtctcccgacggtgccatctgttctcattaaggcagccacagcgccg

SEQ ID NO: 5842 - DNA, 218 bp, Homo sapiens
  misc_feature 1..218: note = U/M: U (0.16:0.81) in Neurons + Oligodendrocytes
  misc_feature 1..218: note = source = chr10:68686999-68687216; Gene: LRRTM3 (exon)
  source 1..218: mol_type = genomic DNA
cgcagactcaaagagctgattcttagttccaatagaatctcctattttcttaacaataccttcagacctgtgacaaatttacggaacttggatctgtcctataatcagctgcattctctgggatctgaacagtttcggggcttgcggaagctgctgagtttacatttacggtctaactccctgagaaccatccctgtgcgaatattccaagactgccg

SEQ ID NO: 5843 - DNA, 469 bp, Homo sapiens
  misc_feature 1..469: note = U/M: U (0.27:0.92) in Neurons + Oligodendrocytes
  misc_feature 1..469: note = source = chr6:161687426-161687894; Gene: AGPAT4 (intron)
  source 1..469: mol_type = genomic DNA
cgatgcgatcatacctccatgccatgaatgagcacccagtgcagttatgaagagaggactgtaatcattgtcatggcatgtaattatgcatctagaaagagtgactgttttatgaagggtgaatggggtgatgggagagcgtcaggaaagcagaggctggaggcagatgctagaaatggactcacaggcatagaaatggttcctatgcaggctacccacacaaaaggccgaagaatctgctcaccatccgccttgcaacctgcccttcccccagcagaaaagagacaagaaaagaaatgagcctgatgacttactcctgggacgcaggacacagtctgagatgattgcattgattgtctgctgatggctgcagtatcctgggaagaagatgtgcttgcatagacagatagttctttaaaatttcatccgcctcggttaacctctacccacagaagactgacagctcacg

SEQ ID NO: 5844 - DNA, 101 bp, Homo sapiens
  misc_feature 1..101: note = U/M: U (0.2:0.83) in Neurons + Oligodendrocytes
  misc_feature 1..101: note = source = chr19:11090675-11090775; Gene: SMARCA4 (intron)
  source 1..101: mol_type = genomic DNA
cgtggagtcgctccacggctctccactttgtgctgcaagtcggccagtgcttgttcaagtgcaggcaccagcaacctcatcacaggctttggcactgggcg

SEQ ID NO: 5845 - DNA, 157 bp, Homo sapiens
  misc_feature 1..157: note = U/M: U (0.19:0.82) in Neurons + Oligodendrocytes
  misc_feature 1..157: note = source = chr5:61028699-61028855; Gene: C5orf64 (Intergenic)
  source 1..157: mol_type = genomic DNA
cggtgggggaggagcagaggaaaatgaattggagcccgttgaataatcgcgtattgttcggccggttgcggtgacctatgaactgatgctccgagaagtgttttcaggccttccttttatatgggcgaggatgggaagcctcttacagctgttgacg

SEQ ID NO: 5846 - DNA, 217 bp, Homo sapiens
  misc_feature 1..217: note = U/M: U (0.21:0.84) in Neurons + Oligodendrocytes
  misc_feature 1..217: note = source = chr2:120473894-120474110; Gene: TMEM177 (Intergenic)
  source 1..217: mol_type = genomic DNA
cgaaagcactgctttcatttcatggttctgcacattttctccagcctctgcagtgaaagattatttcattgccttcaacagaaggcgtatttgtgtgtgtacatatgcttgagagaaatttactgaaaagatgtgggtacgagaccagctggctgcacttgccacgccaggatcctctctcagcaatatgcccaagagctcgtgtttgcaatgctcg

SEQ ID NO: 5847 - DNA, 225 bp, Homo sapiens
  misc_feature 1..225: note = U/M: U (0.26:0.89) in Neurons + Oligodendrocytes
  misc_feature 1..225: note = source = chr1:116929944-116930168; Gene: ATP1A1 (exon)
  source 1..225: mol_type = genomic DNA
cgcgagatggtcccaacgccctcactccccctcccactactcctgaatggatcaagttttgtcggcagctctttggggggttctcaatgttactgtggattggagcgattctttgtttcttggcttatagcatccaagctgctacagaagaggaacctcaaaacgataatgtgagttctgtaattcagcatatggatttgtagtacacatcagatatcttctccg

SEQ ID NO: 5848 - DNA, 264 bp, Homo sapiens
  misc_feature 1..264: note = U/M: U (0.21:0.84) in Neurons + Oligodendrocytes
  misc_feature 1..264: note = source = chr16:19276956-19277219; Gene: SYT17 (intron)
  source 1..264: mol_type = genomic DNA
cggctcacgctgggtgaatctgtgatatttcccattctgtagcccttcatttataacacaggcatagcctgctttcccattagtgagatggcatgcctggactacccacacacagatcaagaattaggcggaacttggccgggaagataaatcaagttaaccgtctcattaggcttgaaagacacaaattaagctgaagttgggattaacagagaagcctttcaaagagacatgcagcacaacaaggggtggaagaagttgccg

SEQ ID NO: 5849 - DNA, 400 bp, Homo sapiens
  misc_feature 1..400: note = U/M: U (0.24:0.87) in Neurons + Oligodendrocytes
  misc_feature 1..400: note = source = chr2:3270259-3270658; Gene: TSSC1 (intron)
  source 1..400: mol_type = genomic DNA
cgcctgagtgtgcaggggcagagactgattgcagaaggcggcaaggctgatgagcaagacaaggatgacaccaactctcttatcctccaggcactggtgaggggcacccgcgcctctgacaagctctgctggccaggaggcagcaggaggtggtgccagcatcacaacaggctgctgccccaacaggaagggggtgctgagaagtggaggtgtcaggggctcgctggccgtgagctccagagacacagtgggcacaagcatgatgtgccaatcagagcagtctagcccagatggagctgcagcagaggccaagagagaaaaagacaggcaggctgctcagcccctactccacatgccagaaaggctcaggacagacagaaagctggcccgatgaccaccg

SEQ ID NO: 5850 - DNA, 153 bp, Homo sapiens
  misc_feature 1..153: note = U/M: U (0.24:0.86) in Neurons + Oligodendrocytes
  misc_feature 1..153: note = source = chr19:33028433-33028585; Gene: PDCD5 (Intergenic)
  source 1..153: mol_type = genomic DNA
cgtgagccaccatgcctggcctcggagcctataatctgagagaaaactgtaactatgtggtaatgagccgcatccagccaataaagagcttgctttatttagagaagacagactttgtttcatggaggaggccaggcttccgaactgagtccg

SEQ ID NO: 5851 - DNA, 375 bp, Homo sapiens
  misc_feature 1..375: note = U/M: U (0.24:0.86) in Neurons + Oligodendrocytes
  misc_feature 1..375: note = source = chr2:241736359-241736733; Gene: KIF1A (intron)
  source 1..375: mol_type = genomic DNA
cggatgggtgcacggcacctgtgaatgggaaggctgtcattgtccacatcctgaagaccaggtggctgttcatgtcaccactcagtgcagctgacaccacttgatcctgtgacggcagcagcagttgcagctgcaccagaggccccagcacaaactgccccgctgagcccagccagccacagaactgagagatgacaattggttcttgctccaagatactgatacggtttggatatgtggggaaacatatgggtgtccttataagaaagccaaacccagtggtgggtgtccttataaaaaagccacatgaaagcagagacacagacacacagaggagaaggccacgtgacgacggaggcagagactagagcaacg

SEQ ID NO: 5852 - DNA, 126 bp, Homo sapiens
  misc_feature 1..126: note = U/M: U (0.2:0.81) in Neurons + Oligodendrocytes
  misc_feature 1..126: note = source = chr8:63602731-63602856; Gene: NKAIN3 (intron)
  source 1..126: mol_type = genomic DNA
cggagtttttcccagcagggctgtgcaccaatcatagcgcctcacccagaaatgccatgcaccatcatgaggtttctcccaaccgggccatgcaccaattacagggcttcttacaacggggccccg

SEQ ID NO: 5853 - DNA, 163 bp, Homo sapiens
  misc_feature 1..163: note = U/M: U (0.18:0.79) in Neurons + Oligodendrocytes
  misc_feature 1..163: note = source = chr15:29284650-29284812; Gene: APBA2 (intron)
  source 1..163: mol_type = genomic DNA
cgtagaataatacagagcctatgatggcagttgaagtggtatcctgtgagaaaattaattagtcctgaaactaaatgccgacagcctcagcaaaatattcatgagagaagcaaacctcgtgcgtggtgtttgaagtcaggcagctgaggctgtgtactggacg

SEQ ID NO: 5854 - DNA, 188 bp, Homo sapiens; identical to SEQ ID NO: 5493
  misc_feature 1..188: note = U/M: U (0.3:0.91) in Neurons + Oligodendrocytes
  misc_feature 1..188: note = source = chr16:11773368-11773555; Gene: SNN (TTS)
  source 1..188: mol_type = genomic DNA

SEQ ID NO: 5855 - DNA, 340 bp, Homo sapiens
  misc_feature 1..340: note = U/M: U (0.25:0.86) in Neurons + Oligodendrocytes
  misc_feature 1..340: note = source = chr19:47999880-48000219; Gene: NAPA (intron)
  source 1..340: mol_type = genomic DNA
cgtgggggtctccatggtcacccaggccatgttcgcctgagaagagggtgctaccaagaagcgccggggctgggctcctctcaaggggctcacggtctggatgggactccaaactccctccgtggggaggcatctggacagaggctctttgtctcaggtctgtggctgggctttcagggagtccaacccctccttctgacatgtaaacagtggggtccataagcactcctctggggagtggggtctgtaggttttgtccaattcagaaagacctctggggatctaaaagggactgagagaaggtacagcactcagtccaggttctagggctgacagaccg

SEQ ID NO: 5856 - DNA, 318 bp, Homo sapiens
  misc_feature 1..318: note = U/M: U (0.28:0.88) in Neurons + Oligodendrocytes
  misc_feature 1..318: note = source = chr1:26229961-26230278; Gene: STMN1,STMN1 (intron,exon)
  source 1..318: mol_type = genomic DNA
cgggcatgtaacaggagttcaataaatgaggactggtatttccttccagtcactggcatatgtaataatcacagtgtagctacaattctgttttcttcctgttatagaaataaaattgatctgcccattacataaattaatatcctgctttctgtgaattgcttcgtttaccttgcgtctttcttctgcagcttctaatttcttctgaatttcctccagggaaagatccttcttctttggaggggaaagggggaattctggaacagattcttttgaccgagggctgagaatcagctcaaaagcctggcctgaggcacg

SEQ ID NO: 5857 - DNA, 450 bp, Homo sapiens
  misc_feature 1..450: note = U/M: U (0.3:0.9) in Neurons + Oligodendrocytes
  misc_feature 1..450: note = source = chr4:185706178-185706627; Gene: ACSL1 (intron)
  source 1..450: mol_type = genomic DNA
cgggcgcactgcagccaagggccaaatcaggcccactggctgtttttgtagacacagtgatagtggcacacagccacactcattcatttttgttctgtgtgaggctgcagttgagtagttgcaaccaagaccatatggcaccaaagccaaaaatatttactaccaggctttttacagaaaacatatgccagctccagctccagaactagccgttaagctgcaggctcaccaggggaacttgatactataccaggttctactatacccaggctctagaattttttattcagttgaatagggatggggcctgggcctcagtattttttagaagctccccgatggcacaaaagtgcagctagagatgagagccactgagaagcagggagctcaatctttataaatggcttccttggtgcagttttaaagtactaggtttaaaaactctaggcg

SEQ ID NO: 5858 - DNA, 91 bp, Homo sapiens
  misc_feature 1..91: note = U/M: U (0.22:0.81) in Neurons + Oligodendrocytes
  misc_feature 1..91: note = source = chr1:11543075-11543165; Gene: PTCHD2 (intron)
  source 1..91: mol_type = genomic DNA
cgcatttcacgggcagacagtgcggctcacgctgcagctgcccaacaaaggccggaggcatggatgctgcgggaccagtccagggatggcg

SEQ ID NO: 5859 - DNA, 123 bp, Homo sapiens
  misc_feature 1..123: note = U/M: U (0.23:0.82) in Neurons + Oligodendrocytes
  misc_feature 1..123: note = source = chr14:105011650-105011772; Gene: C14orf180 (Intergenic)
  source 1..123: mol_type = genomic DNA
cgcacacactgtcccatctcaggagggtctcactgctgccctttcctggctgtactgatggcccaaggggatgcgggaaccatcaagaccgagtccctctggaggtgcctcatccccgcaccg

SEQ ID NO: 5860 - DNA, 127 bp, Homo sapiens
  misc_feature 1..127: note = U/M: U (0.22:0.81) in Neurons + Oligodendrocytes
  misc_feature 1..127: note = source = chr8:30889770-30889896; Gene: WRN (promoter-TSS)
  source 1..127: mol_type = genomic DNA
cgatatagtctgttttcaggacactgtgaggatgctcttcggaccccaccgagactggtggggagggtgccgagtgcttctgcctccttctggagccttgctctttgctgtggccatgctcttgccg

SEQ ID NO: 5861 - DNA, 67 bp, Homo sapiens
  misc_feature 1..67: note = U/M: U (0.23:0.81) in Neurons + Oligodendrocytes
  misc_feature 1..67: note = source = chr19:51051642-51051708; Gene: LRRC4B (intron)
  source 1..67: mol_type = genomic DNA
cggctccagctgataggatgcagacccgcaggccacatccacaggtgccggagacggggaagccccg

SEQ ID NO: 5862 - DNA, 225 bp, Homo sapiens
  misc_feature 1..225: note = U/M: U (0.2:0.78) in Neurons + Oligodendrocytes
  misc_feature 1..225: note = source = chr11:1591878-1592102; Gene: DUSP8 (intron)
  source 1..225: mol_type = genomic DNA
cggctggctgcagcaggaggtatttcagcgagacttcaggatgaacttccagctggggtcacatgatctgccatccgcatccagtgcttattagcagtgaatgcatgggactgtcctcctggtggagggctggggcctggggtgctacattcacccctggaccgccctaggtgcaacagtgtctctgggtgggctgtgccagaagggaggcaagggagagtgccg

SEQ ID NO: 5863 - DNA, 150 bp, Homo sapiens; identical to SEQ ID NO: 5504
  misc_feature 1..150: note = U/M: U (0.31:0.88) in Neurons + Oligodendrocytes
  misc_feature 1..150: note = source = chr14:105783388-105783537; Gene: PACS2 (intron)
  source 1..150: mol_type = genomic DNA

SEQ ID NO: 5864 - DNA, 277 bp, Homo sapiens
  misc_feature 1..277: note = U/M: U (0.29:0.85) in Neurons + Oligodendrocytes
  misc_feature 1..277: note = source = chr15:97118141-97118417; Gene: SPATA8 (Intergenic)
  source 1..277: mol_type = genomic DNA
cgagtgcttggcaggacagtgcatgcatgcaaatgtgggctgtgcatggcgacagcaggttttcctccaactggaggatgttgctattcaagggggctgatgaatgaaaccagaattgcatcaactgcagtggaaaggcggacaggagcacgagacagctgcgcgggtgaccgctttacaactagaagctatcaatcagaaggcgtgaaaggcccaaatccagggaaaccaggatcccacccccttgataccaatcctaatagagtgccagtcaccg

SEQ ID NO: 5865 - DNA, 345 bp, Homo sapiens
  misc_feature 1..345: note = U/M: U (0.32:0.88) in Neurons + Oligodendrocytes
  misc_feature 1..345: note = source = chr3:9273460-9273804; Gene: SRGAP3 (intron)
  source 1..345: mol_type = genomic DNA
cgcagcactcgagagtttactttctcacacaccacctcatttgatcctcacagcaaccaccctttaaggttgataatgccctcatttcacagatgaggaagccaagatgcagaatgaagaatgcagacgtgactcgctcaaaagacagaccagagatggaaaatcgggtcttatgagtctaaaccccagactctggccactgcatcacgatggctcctgactgaaactcggtaaattaaaaggttaagctgaacttttccactcttctacccatatttcaaagttttgaaagagtatggaaaaacttcctcactgcgtgggggaataattcggtaaaatattacg

SEQ ID NO: 5866 - DNA, 181 bp, Homo sapiens
  misc_feature 1..181: note = U/M: U (0.28:0.83) in Neurons + Oligodendrocytes
  misc_feature 1..181: note = source = chr4:5860051-5860231; Gene: CRMP1 (intron)
  source 1..181: mol_type = genomic DNA
cggttgtgttcttggcttctccaccgagatgactcaaaagctcccccaaatgagaatgtccaaaacctcatgcaatactctccccaccccgaccccagctgtggtggacatcaccaaccaacggttccacagccagaggcccaggtcacccgtggcacttcctttccctcacatgcccccg

SEQ ID NO: 5867 - DNA, 413 bp, Homo sapiens
  misc_feature 1..413: note = U/M: U (0.34:0.88) in Neurons + Oligodendrocytes
  misc_feature 1..413: note = source = chr3:119450493-119450905; Gene: MAATS1 (intron)
  source 1..413: mol_type = genomic DNA
cgtcacgatcttgtataagatttttacccccattgaaaacgcacaatgcagagccgccaaaaggtcttgggtctgtgatgggatttgagagaaaaggagcacaggaggtggcgagcatgactctttagatgagtatactcctgatgtgcacagttgagcctttccctctgactgccaaacagttcagaaagctgtaagctgagacagtctttggtttattttggtgttaaccaagatgaacctgtagtctttgcttttgattatccttgtaggggagaataattccctagttccccactgaacatgtattttccagttgctttgagtttcattcatttaacaaacttttactgaatacctcttcttggcctggagcttgaaatgcagttataaaagatttttgacgagtaccg

SEQ ID NO: 5868 - DNA, 207 bp, Homo sapiens
  misc_feature 1..207: note = U/M: U (0.22:0.75) in Neurons + Oligodendrocytes
  misc_feature 1..207: note = source = chrX:10151770-10151976; Gene: CLCN4 (intron)
  source 1..207: mol_type = genomic DNA
cgcgattgttttccaggtgaggagagctggaatagtgggagtagaattattatcttggataggaaaggaagacacattcaactgtgctactgccctggcagcaggagcccttttgactgcattttaagacattaaaaatgagcatctgtcctggagctccttgcccagggcagcgtgccaccagcttctcatggctcttggctcgcg

SEQ ID NO: 5869 - DNA, 287 bp, Homo sapiens
  misc_feature 1..287: note = U/M: U (0.32:0.82) in Neurons + Oligodendrocytes
  misc_feature 1..287: note = source = chr8:48102533-48102819; Gene: LOC100287846 (exon)
  source 1..287: mol_type = genomic DNA
cgtgtgatttctcagtgtactgtactgtgatttgtttttattgcttgttttgtttcccctcagtgtctgtaacccttagcaggctctgacctagtcaggctagaagaagcataaggatcttttattgctttgtgctgggtgagggctggccctaaacatctgcctaatcctttcaacgggcccaggaaaagccagactggcatcatgtccacagcatcgcttaatatcgttggttgtcatccagacacctcaacttgtgctgcagaggaaataagttccttctcacg

SEQ ID NO: 5870 - DNA, 103 bp, Homo sapiens; identical to SEQ ID NO: 5551
  misc_feature 1..103: note = U/M: U (0.28:0.75) in Neurons + Oligodendrocytes
  misc_feature 1..103: note = source = chr5:141263876-141263978; Gene: PCDH1 (Intergenic)
  source 1..103: mol_type = genomic DNA

SEQ ID NO: 5871 - DNA, 46 bp, Homo sapiens
  misc_feature 1..46: note = U/M: U (0.04:0.86) in Neurons + Oligodendrocytes
  misc_feature 1..46: note = source = chr10:3283867-3283912; Gene: PITRM1 (Intergenic)
  source 1..46: mol_type = genomic DNA
cgctgaataaaatcgtgctgcgggaccacagtgcggggaggcaccg

SEQ ID NO: 5872 - DNA, 205 bp, Homo sapiens
  misc_feature 1..205: note = U/M: U (0.08:0.9) in Neurons + Oligodendrocytes
  misc_feature 1..205: note = source = chr13:101302863-101303067; Gene: TMTC4 (intron)
  source 1..205: mol_type = genomic DNA
cgcgttccaaaagctggaacgaccaagccgtgcttctatgcacagaatgaaagaagtcaggcttgctggtctaaaacacgggtccatttgggggaaaatcaagcaatgaagcaaccaaagaaacagggaaaagagaatctgcatgactcccaccgtcagaatgcagtcagcaatggccccaaattgaaaaccaagcgtcctatcg

SEQ ID NO: 5873 - DNA, 217 bp, Homo sapiens
  misc_feature 1..217: note = U/M: U (0.04:0.86) in Neurons + Oligodendrocytes
  misc_feature 1..217: note = source = chr1:2005852-2006068; Gene: PRKCZ (intron)
  source 1..217: mol_type = genomic DNA
cgatgctttttggttgtgggtctgtgggtctgtcggggccaggacggatggccgcttcgtctccattctgcattgctgcaggtgggcagattgatgagaccacgggtgaagtctggagaccccaggtgccagggctggtagtggtaacagccagcacctgttccaggcctgcggtctttccgtctcgagcctgccctcccgcctgtctgagcccccg

SEQ ID NO: 5874 - DNA, 250 bp, Homo sapiens
  misc_feature 1..250: note = U/M: U (0.08:0.86) in Neurons + Oligodendrocytes
  misc_feature 1..250: note = source = chr9:96846792-96847041; Gene: PTPDC1 (exon)
  source 1..250: mol_type = genomic DNA
cggctcttgcctcccagtgccatgcaggtgcaggatgcaaccaggcggccctcagccgtgcgcttcctcagctcctttctccagggccgccggcactccacctcagacccagtactgcggctgcagcaggcccggcggggctctggcttgggctccggctctgccacgaagctgctgtcctcgtcctctctccaggtgatggtggctgtttcctcagtcagccatgcagagggaaacccaactttccccg

SEQ ID NO: 5875 - DNA, 309 bp, Homo sapiens
  misc_feature 1..309: note = U/M: U (0.07:0.85) in Neurons + Oligodendrocytes
  misc_feature 1..309: note = source = chr13:113698901-113699209; Gene: MCF2L (intron)
  source 1..309: mol_type = genomic DNA
cgcaattggcttggctgcagagtgagcccacggaagagggctctccgcaccgactctgtgactcaggcttctactaccaggctcatccgaggacggaggctgtcgttatacaacgcgcaagtgtggtctctgtcacagatgtggctgtcgcagagagtgctgcctcctctcccgtttccagcagatgcttgggaaccttcagaagtcttggggattttctcccagcaccgtagccatgccaccacgagtgaatccttaacgtggaccagcacgggcacctcagatgccaggaccggcgtgatgtatgcg

SEQ ID NO: 5876 - DNA, 444 bp, Homo sapiens
  misc_feature 1..444: note = U/M: U (0.12:0.9) in Neurons + Oligodendrocytes
  misc_feature 1..444: note = source = chr18:53074628-53075071; Gene: TCF4 (intron)
  source 1..444: mol_type = genomic DNA
cgtcaatcaatccttctggagacaaaggagatcaacatgcagccccgtctacagaacaagtcggcatctccagtgagcaaacagtccaggaagtcaacatgtgttctgtccaaatcgaacccgtccgctgctaaagcctatatttaaatttgattattaaaaatggcaccaaatggcaatcaataaaggattcacttgcttcccctggcccagaaaaactaatatgagcaggaaaggcaagcaacttccatataaaaaaaaaaaaaaaaaagtcaatgttttgctgatctattcaacaatcttttatcttgctgtcccaagaaggagcaggaaaatttgctttttatttgagggtgatatggttaacaaatgtctatagaatttcaaattgaatatttttatattcttgtattatcagccatttgacttccaatttttcttccg

SEQ ID NO: 5877 - DNA, 238 bp, Homo sapiens
  misc_feature 1..238: note = U/M: U (0.16:0.92) in Neurons + Oligodendrocytes
  misc_feature 1..238: note = source = chr20:24959344-24959581; Gene: APMAP (exon)
  source 1..238: mol_type = genomic DNA
cgccccctcagacaacagacagcctggaaggctccccccccacccaagcttagacttacccccaatatgtgctatggactccggtccaacaagttgattttcaaacagcctttctgcctgtcgcagcttcgtatttggatgcagaacaccaagcaagagcgggggttctttgaagctgcaaaataatgcaattccagagatctgtctataaatacacatgtgaagaaaatgtgtaccg

SEQ ID NO: 5878 - DNA, 250 bp, Homo sapiens
  misc_feature 1..250: note = U/M: U (0.18:0.94) in Neurons + Oligodendrocytes
  misc_feature 1..250: note = source = chr1:14113094-14113343; Gene: PRDM2 (exon)
  source 1..250: mol_type = genomic DNA
cggcaaaggatacgaaatctaccaagcttgcaagaccagttgaagctgactcaaaaatcctaacattcagctgattgccggcaggcttagagtcaggcatctgctgcttcggtgggggcccaacgcgcatgctgggcgcccgggtgattgagatccaaagagaagggcactgtaagacaggccagatgaactggctcctcgtcatgggactggtacctcagatctgagcatggcccttgtttttggcacg

SEQ ID NO: 5879 - DNA, 258 bp, Homo sapiens
  misc_feature 1..258: note = U/M: U (0.12:0.88) in Neurons + Oligodendrocytes
  misc_feature 1..258: note = source = chr16:88677591-88677848; Gene: ZC3H18,ZC3H18 (exon,intron)
  source 1..258: mol_type = genomic DNA
cgcgtggtgttggagccaaggctttcagtgcctctgtcacccaaataacgcacggtgtccccatgtgtttggctttttaacaaaggaaagggagcgggagcgagagagagagaacagacagcgcgagcgcgagcgggagcgggagcgggaccgagagcgggagcgccggcagagggagcgcgagcgagagcgggagcgcgagcgcgacaaggagcggcagcggaggaaggaggagtgggagcgtgagcgagccaagcg

SEQ ID NO: 5880 - DNA, 51 bp, Homo sapiens
  misc_feature 1..51: note = U/M: U (0.12:0.86) in Neurons + Oligodendrocytes
  misc_feature 1..51: note = source = chr8:139613769-139613819; Gene: COL22A1 (intron)
  source 1..51: mol_type = genomic DNA
cgcataaagcctccaaagggagcagcagtcgtgagtgtgagaacgcgtccg

SEQ ID NO: 5881 - DNA, 171 bp, Homo sapiens
  misc_feature 1..171: note = U/M: U (0.14:0.88) in Neurons + Oligodendrocytes
  misc_feature 1..171: note = source = chr5:11564974-11565144; Gene: CTNND2 (exon)
  source 1..171: mol_type = genomic DNA
cgggttggaaagaagagaaacatcacgatttacttgcaggggcaactcaaagcacagacaatgaacagagcggcgctagtacctcatgctgctcatgctgccagtctcggatccgagcttgcatcgctccagctggctggctacgatctgccgttcagcctccagctctcg

SEQ ID NO: 5882 - DNA, 258 bp, Homo sapiens
  misc_feature 1..258: note = U/M: U (0.11:0.85) in Neurons + Oligodendrocytes
  misc_feature 1..258: note = source = chr10:131694516-131694773; Gene: EBF3 (intron)
  source 1..258: mol_type = genomic DNA
cggctgccggatgtcaggtggcctcagtggtcatagcagccaccatgcaaaaacaagcccgagctcagctggtgctgggaagattcacttattctacttgaatgcacattaaaagagggactgaatgaagccaagcaacaagacataacctgacagctccgctcccggccacgcggccaccgtcagccaccctggcctggcgtcgcccgccattcctggcccctccgagcagctggctggacggggcgggggccggcg

SEQ ID NO: 5883 - DNA, 222 bp, Homo sapiens
  misc_feature 1..222: note = U/M: U (0.15:0.88) in Neurons + Oligodendrocytes
  misc_feature 1..222: note = source = chr15:82042494-82042715; Gene: MEX3B (Intergenic)
  source 1..222: mol_type = genomic DNA
cggcatcttctgcaccaggtggaggacaggcagctttgcacaactgaacatccctgagccagccggcctctgagcatcttgcgctggcagtgccgggcaaagctcccgggaggggaggctgcctggcatggagggggcattgataaaatggcagcccctgtccttggctccgttatgcttacaggctccaaatggcctttatctcggtcctcgcagcctgcg

SEQ ID NO: 5884 - DNA, 59 bp, Homo sapiens
  misc_feature 1..59: note = U/M: U (0.24:0.94) in Neurons + Oligodendrocytes
  misc_feature 1..59: note = source = chr16:50897241-50897299; Gene: CYLD (Intergenic)
  source 1..59: mol_type = genomic DNA
cgcgggaccagccgggagcggccggtgaggcggcgtgaatgcgccgctaattatcaccg

SEQ ID NO: 5885 - DNA, 195 bp, Homo sapiens
  misc_feature 1..195: note = U/M: U (0.22:0.91) in Neurons + Oligodendrocytes
  misc_feature 1..195: note = source = chr3:51731038-51731232; Gene: TEX264 (intron)
  source 1..195: mol_type = genomic DNA
cgcagggccacagttttctctccatcctctgtctcccttgatcctctgttctccctgatggctttgagatgaaggcgacggcaaggatggaggatgcagtttccatggcaacggggctgtccacagccaggcaacttcagagccgggctctccggaggaagcagatgcgcagaacagccgcagagctgcctcccg

SEQ ID NO: 5886 - DNA, 399 bp, Homo sapiens
  misc_feature 1..399: note = U/M: U (0.2:0.88) in Neurons + Oligodendrocytes
  misc_feature 1..399: note = source = chr22:32020786-32021184; Gene: PISD (intron)
  source 1..399: mol_type = genomic DNA
cggcctctccccaccctcccagcacaaatgcagggcactcagcaggggctcagcttcaccagagccgcagaggctggacgggcctttccaccacaaccctggcctcctgcgcctaaacaaggcccaccccaccctgtctgtgcctaggcctagcaaatgctcctgaggcccagggtagccagcaggagaccacactgccatccactcagaacgtccccaggtctcagtttcctcatctgcaaagtaactgcatttagctaatctacggctgccatctgggactgtgctctcaagagaagctgagtcctctctcccagttgctgagcaaaccaaggaacaaagcagcatctcagctgatagcagcagagcagacggcaggcgaaccagtggcgaaccccg

SEQ ID NO: 5887 - DNA, 353 bp, Homo sapiens
  misc_feature 1..353: note = U/M: U (0.24:0.91) in Neurons + Oligodendrocytes
  misc_feature 1..353: note = source = chr10:3283414-3283766; Gene: PITRM1 (Intergenic)
  source 1..353: mol_type = genomic DNA
cgagtcgctggctgcagttctcagacccaggctctgccgatctcatcccaggctggaagagttgccaccaaggcgtgtgggtgccatttgctgcaaaagttcttatggagaaccatgacacataaccgtgccagcttctcatgccgggagaccgcagcgcctctccacacaagtggggccttccttctgcacttttattctgcagttgggctcccgctccagggggctccgtgtttctaagaaccacagcccagcatcattaaagaaggcattattttgtgtttagtagagcactaaattggtgaaatatagttgtgattctggtagtgaatatccctgttgccacggtaacg

SEQ ID NO: 5888 - DNA, 394 bp, Homo sapiens
  misc_feature 1..394: note = U/M: U (0.24:0.91) in Neurons + Oligodendrocytes
  misc_feature 1..394: note = source = chr7:2815153-2815546; Gene: GNA12 (intron)
  source 1..394: mol_type = genomic DNA
cgaaaaggcctggagccgaagcactctgccagctcttttcataaacgcagaagcaaaacagagctgcctggtctatgggcatctgcgaaacttggatactaaacgcctgtgtcctacccaacagcctgttctaacgtgacgggctttcttaggagaagatatctgccatcaaactctgcctatgaattaaagcagagggccaggctccgaatcacgtcacaagtggaagagacctcagaggctcatcagtggctctcaatacaggccaggctcagaatcacctaaggagcctcccacagagctggcagagtcctcccctcccttcatccctcacactacctggacaggttacccaggggcacagggcccagacccgtactgtggaaaaggtccg

SEQ ID NO: 5889 - DNA, 489 bp, Homo sapiens
  misc_feature 1..489: note = U/M: U (0.22:0.89) in Neurons + Oligodendrocytes
  misc_feature 1..489: note = source = chr8:10001036-10001524; Gene: MSRA (intron)
  source 1..489: mol_type = genomic DNA
cgcagttctcatcgacaatggcatagatcaaacattattgccagacataaaaccccgggtcgctccctgtcattttccccgttaccagaagcagcaaatgcaagctgaagtctaacttttgcaaggaaatcagggctccttctggctcctctgatatctaccctcatgacagaattccaagcaagagggccactttcgtttccaatcaccctgtgcccatgggaagggcaagcaccattttgcgtcactgcaaacctgactcttcagatacatatccagacaaaaagttgttttaatgtgacctctaactcttcctcaaaccttattcttattcttggagcagccgactttttctttctttctcatcgattttgtagattcttgtctgctgcttttctataggaagtccgtgtcaagaagcaggggagaccaagacgccactcctgttgaggatgttctgtggtgaatcacagagcctcgtgaggctcg

SEQ ID NO: 5890 - DNA, 221 bp, Homo sapiens
  misc_feature 1..221: note = U/M: U (0.3:0.94) in Neurons + Oligodendrocytes
  misc_feature 1..221: note = source = chr12:50296224-50296444; Gene: FAIM2 (intron)
  source 1..221: mol_type = genomic DNA
cgcaccagaagacttctggttccatccaggcccaaggaccactgaactggagcggtcttctccatcccccagcaagcctgtgcgtgagctggggacaaggggcagaggaggcagaggtccccctcacaccaggaagggaacagcgccactaaagggcctggtggaggcagggtggaggtggaaggagactcagcagaaggggtgagttctccatgtttacg

SEQ ID NO: 5891 - DNA, 492 bp, Homo sapiens
  misc_feature 1..492: note = U/M: U (0.26:0.9) in Neurons + Oligodendrocytes
  misc_feature 1..492: note = source = chr10:15000265-15000756; Gene: MEIG1,MEIG1 (Intergenic,promoter-TSS)
  source 1..492: mol_type = genomic DNA
cgggctgaagagagaaatttgggagttgtaagtaaatagttttttgtttttagttttactaagtattgcctttgttttagtatgactcgtttatttagaagtttatataatttaatttgtgatatgtcttgtgtttttgttttgtttggggcaggtgcccgaggcccttgtcatcttcattgactccagctcatggcttgtatttaacaacgagctcagaaaaattcctaaaaatttaattactgagtctccagagctctaatgagctggctccagcacacaattgctcctttctttcattcaacaatttgacaagtcctgatggctctacattcaaaacatgtaaattggccgggcgcggtggctcacgcctgtaatcccagctctttgggaggccgaggcgggtggatgacgaggtcaggagatcgagatcatcctggctaacacggtgaaaccccgtctctactaaaaatacaaaaaattagccaggcg

SEQ ID NO: 5892 - DNA, 122 bp, Homo sapiens
  misc_feature 1..122: note = U/M: U (0.15:0.78) in Neurons + Oligodendrocytes
  misc_feature 1..122: note = source = chr11:1420702-1420823; Gene: BRSK2 (intron)
  source 1..122: mol_type = genomic DNA
cgatgggatttttgtggagctctctctgctggggacaatgagaggggagccgtgagccgtgatagggattgtggcaaggccgggctggtcagctggggatgccagggccgcacagtccctcg

SEQ ID NO: 5893 - DNA, 140 bp, Homo sapiens; identical to SEQ ID NO: 5572
  misc_feature 1..140: note = U/M: U (0.21:0.84) in Neurons + Oligodendrocytes
  misc_feature 1..140: note = source = chr19:51046227-51046366; Gene: LRRC4B (intron)
  source 1..140: mol_type = genomic DNA

SEQ ID NO: 5894 - DNA, 280 bp, Homo sapiens
  misc_feature 1..280: note = U/M: U (0.23:0.86) in Neurons + Oligodendrocytes
  misc_feature 1..280: note = source = chr14:51559477-51559756; Gene: TRIM9 (intron)
  source 1..280: mol_type = genomic DNA
cgtttatgtctgtgtgtgtacagggagcaatagataaatacaaaaaataacataattaaaatatatagcatgccacacagggataaatactactgaggaaaataaagctgagagggaactagcgggtgtctgggtgggtggcgctgcaaagatgatacctgagcaaagagctgaaggatgcaggtaagtgacccattcggatctcaggtaactggggaagagagcttcaggctgaatgaacaccaaatgcaaaggccctggagtagggaggtgcctggcg

SEQ ID NO: 5895 - DNA, 183 bp, Homo sapiens; identical to SEQ ID NO: 5569
  misc_feature 1..183: note = U/M: U (0.28:0.9) in Neurons + Oligodendrocytes
  misc_feature 1..183: note = source = chr14:69157866-69158048; Gene: ZFP36L1 (Intergenic)
  source 1..183: mol_type = genomic DNA

SEQ ID NO: 5896 - DNA, 88 bp, Homo sapiens
  misc_feature 1..88: note = U/M: U (0.18:0.79) in Neurons + Oligodendrocytes
  misc_feature 1..88: note = source = chr16:88677852-88677939; Gene: ZC3H18 (exon)
  source 1..88: mol_type = genomic DNA
cgagaaggaccggcagcaccgtgaccgcgaccgggagaaggagcgggagaaggagaaggggaagcccaagccccgctccccgcagccg

SEQ ID NO: 5897 - DNA, 219 bp, Homo sapiens
  misc_feature 1..219: note = U/M: U (0.26:0.84) in Neurons + Oligodendrocytes
  misc_feature 1..219: note = source = chr2:240320293-240320511; Gene: HDAC4 (intron)
  source 1..219: mol_type = genomic DNA
cgcacgtggccagcgtgccaggttgtcctgtccatcttgctacagcaacagcccccaaggcctccgagaatatggcatttggggatttttattttgcatggctaggaagctgctgaacacagaacattctctctggtgcagggctccgaggccacatctgtccttcgtccctaggccttccaggcccatatgcagtccagtcatcttccctccaccccg

SEQ ID NO: 5898 - DNA, 400 bp, Homo sapiens
  misc_feature 1..400: note = U/M: U (0.32:0.9) in Neurons + Oligodendrocytes
  misc_feature 1..400: note = source = chr22:27680331-27680730; Gene: MN1 (Intergenic)
  source 1..400: mol_type = genomic DNA
cgaagaggtgaaaaaagggtccaagttcactcaggaagtccctggaagttcctggctcctgactctgcgcagaaggggaatcgtgctggatgtgagctcacattcagagagagaaaaagagagagagggagatgctccttttagcgctggctgcctgcagcataaatatatgcaaatgtattcagagaagcgctgcatggcatgggcagatagaggcaaagtgaggaggaaaattcatctccgtctcagggattttgcctctgatagggttctcctggagatctcggtgaaaccttcattatccccccttcttctctccaattggtccccacatcctggctgattctgcttaaaaactcatctctcaaatctgccccttctcaccagccctgcaccagcg

SEQ ID NO: 5899 - DNA, 190 bp, Homo sapiens
  misc_feature 1..190: note = U/M: M (0.88:0.12) in Neurons + Oligodendrocytes
  misc_feature 1..190: note = source = chr1:48035596-48035785; Gene: FOXD2 (Intergenic)
  source 1..190: mol_type = genomic DNA
cggcccagatatcttcatatcattcttttagttgctatttgttgagttggtattagtcacctacttgtgtgtcaagcactgtgctgggagctccaccctgaccccaagaggaaggaattattaaactcacttggaggaggaggaagctgagactcagagatggaatgcgacttgccaaggtcgttccgcg

SEQ ID NO: 5900 - DNA, 131 bp, Homo sapiens
  misc_feature 1..131: note = U/M: M (0.82:0.1) in Neurons + Oligodendrocytes
  misc_feature 1..131: note = source = chr12:124247229-124247359; Gene: ATP6V0A2 (TTS)
  source 1..131: mol_type = genomic DNA
cgcccgccacgtgcaggccccgggcgaacccagcaatcacagccgtccctgccctcctgggcccacagcccacttgaaagtcaggccttgattgaaaaatcacagcaaacactgacttagcccgcaccccg

SEQ ID NO: 5901 - DNA, 79 bp, Homo sapiens
  misc_feature 1..79: note = U/M: M (0.86:0.15) in Neurons + Oligodendrocytes
  misc_feature 1..79: note = source = chr18:76529112-76529190; Gene: SALL3 (Intergenic)
  source 1..79: mol_type = genomic DNA
cggatctcctctgaaagcaaaatattgtaacagctctgcaggtaaacaaacaggcggcctgtgccgcggccggaacccg

SEQ ID NO: 5902 - DNA, 164 bp, Homo sapiens
  misc_feature 1..164: note = U/M: M (0.83:0.14) in Neurons + Oligodendrocytes
  misc_feature 1..164: note = source = chr19:46017956-46018119; Gene: VASP (intron)
  source 1..164: mol_type = genomic DNA
cgggctcctggccagagtcggccctgggtgtgggtggcaggtgtgggtgaggccgaggccttaaccctgccttgccaggggcagcaggagccagaaacagcccccgaggctgtgtttgtctggaaagggcacctggtgtttgggtggggcccacacagttcccg

SEQ ID NO: 5903 - DNA, 165 bp, Homo sapiens
  misc_feature 1..165: note = U/M: M (0.82:0.14) in Neurons + Oligodendrocytes
  misc_feature 1..165: note = source = chr14:94425764-94425928; Gene: ASB2 (intron)
  source 1..165: mol_type = genomic DNA
cgtgagtctcagggctggctggggagccagggcccctggctgggtttcgtgctctcgccaatcaaggctggaggccccatttcccctcgggccccaagcaggggaattcccaacagagcaaacctcctgggctgagtcatcacaggcgagaggagcctggcctcg

SEQ ID NO: 5904 - DNA, 390 bp, Homo sapiens
  misc_feature 1..390: note = U/M: M (0.78:0.13) in Neurons + Oligodendrocytes
  misc_feature 1..390: note = source = chr1:37176500-37176889; Gene: CSF3R (Intergenic)
  source 1..390: mol_type = genomic DNA
cgtgtcctgtccccagatacacccacatgccaaattcaagctatttacctactagtcagaaagtagaaaaaggggacactaaaaaaaaaaacaacaacaaaaacaacccacagagactcgttggagtttaacactcatttaactctccgtgagatcacagccatcctttcttccctggggagaattttcttccccattcctttagaagaaaggaacgtaattcttttggagattacattccctgtaaactggtttcttaagctcccgcctgaggaagtgttccaaagtctgcagactaattaaccccattgttcagaattaatcacctcaggaatatttggagtcaacaagaaatgtatcaattgggctcttaataaacctaatgaaacg

SEQ ID NO: 5905 - DNA, 178 bp, Homo sapiens
  misc_feature 1..178: note = U/M: M (0.86:0.24) in Neurons + Oligodendrocytes
  misc_feature 1..178: note = source = chr17:47563495-47563672; Gene: NGFR (Intergenic)
  source 1..178: mol_type = genomic DNA
cggcaggcagagatcacattccttcctgggttaaggaccaactccccactcggagtgcagagcagggggaccaccccagcgcaggtacaggaagtggtgggaggcctttccctctgggccccagcagcagtttctgcagtctcctgtcccactggagtgcagaggcgggttgggaacg

SEQ ID NO: 5906 - DNA, 42 bp, Homo sapiens
  misc_feature 1..42: note = U/M: M (0.78:0.19) in Neurons + Oligodendrocytes
  misc_feature 1..42: note = source = chr17:72353695-72353736; Gene: BTBD17 (exon)
  source 1..42: mol_type = genomic DNA
cggtgcccaccgcgtagtggtaccagcccaccgccgggcccg

SEQ ID NO: 5907 - DNA, 137 bp, Homo sapiens
  misc_feature 1..137: note = U/M: M (0.78:0.2) in Neurons + Oligodendrocytes
  misc_feature 1..137: note = source = chr19:13828284-13828420; Gene: CCDC130 (Intergenic)
  source 1..137: mol_type = genomic DNA
cggagcttttttgcagctattgaaggctgtctgcgtgcagatgctgccagaagttaggaagagataaagccccgaggaggtaacgctcaaccagtgcagagtcaataaatgaatgtgtcactccccaccctcatccg

SEQ ID NO: 5908 - DNA, 148 bp, Homo sapiens
  misc_feature 1..148: note = U/M: M (0.76:0.18) in Neurons + Oligodendrocytes
  misc_feature 1..148: note = source = chr4:3730359-3730506; Gene: ADRA2C (Intergenic)
  source 1..148: mol_type = genomic DNA
cgggcctgggccgtcattcctgtccccagggagagggtgtgaggatcaggaaaacaccggaagagtttcctgatgcctgaaaaaaaatcgtccgggcagcagctttcccctgggaacctctcagggcacggggcctgctcccctcccg

SEQ ID NO: 5909 - DNA, 326 bp, Homo sapiens
  misc_feature 1..326: note = U/M: M (0.63:0.07) in Neurons + Oligodendrocytes
  misc_feature 1..326: note = source = chr3:53107216-53107541; Gene: SFMBT1 (Intergenic)
  source 1..326: mol_type = genomic DNA
cggcctctgcccaggctgggttccggggccttcccccatgtgcccacatcccatgcttcccccgttacagcctctgccgtcagactgcgcaccagcatctgtgggtgaggagagaacctgggctggggcttgacacaaaaggggctttgcctctggacacccccacctgtgccgcaagtggagggggcggggaaacggggaggagggaaagtaagcggaagtcccgcctctgtggaagcgcctctgcaccctttgtcccccaagggaagcacaagtgtgtggccagtcagataaagcaggcctttccttgcctttatggagccacg

SEQ ID NO: 5910 - DNA, 154 bp, Homo sapiens
  misc_feature 1..154: note = U/M: M (0.75:0.2) in Neurons + Oligodendrocytes
  misc_feature 1..154: note = source = chr19:5430397-5430550; Gene: ZNRF4 (Intergenic)
  source 1..154: mol_type = genomic DNA
cgagggtgagaggtgggaggttgggggcgtggttggggtgtggcttgggcatggcttggaggcgaggctaacagggcgccagggagagatgagagtgaaatggaagatgaaagataaagcaggcagctgagttcctgcacccattctctcgacg

SEQ ID NO: 5911 - DNA, 161 bp, Homo sapiens
  misc_feature 1..161: note = U/M: M (0.68:0.13) in Neurons + Oligodendrocytes
  misc_feature 1..161: note = source = chr19:46142858-46143018; Gene: EML2 (promoter-TSS)
  source 1..161: mol_type = genomic DNA
cgcgcctgcttgagttaaaaccccagttctgctaattcctagcagtgtacacaggtcgtccaacctctgcctcggtttcctcatttaaaaaatggggataataagagtacccggccgggcgcggtggctcatgcctgtaatcccagcactttgggaggccg

SEQ ID NO: 5912 - DNA, 412 bp, Homo sapiens
  misc_feature 1..412: note = U/M: M (0.8:0.13) in Neurons + Oligodendrocytes
  misc_feature 1..412: note = source = chr8:41180988-41181399; Gene: SFRP1 (Intergenic)
  source 1..412: mol_type = genomic DNA
cgggaggagagcttggaaggtcatatacctgtcattctgggagagtgcttggcagctgctccttccagcctgcaggaattcatcctgcaataacttgccacacaagacacacctttcccgtttggactggacgctgtcccaggacaggagggaggtggagggctgccttgggtgctgcagagagcacccgacctcctccctggagatgcctagaggtgtttgttctcaggaaatgttggtcaagctgcgtgtcacctgataagagaggagagacagagagctgggtggttcagacatcgggaagtgtgtggggacatgaggcaggatccagcagggctggattttctgcaaagctaacaaggctcagggcagaagtgcagcaactgggagcaggagtcctggctccaagtcg

SEQ ID NO: 5913 - DNA, 458 bp, Homo sapiens
  misc_feature 1..458: note = U/M: M (0.88:0.02) in Neurons + Oligodendrocytes
  misc_feature 1..458: note = source = chr14:70038634-70039091; Gene: CCDC177 (exon)
  source 1..458: mol_type = genomic DNA
cgccgaccctgcagctcctctcgccgggcccgctcccgcagctcccgggtgcgctgctccaccaaatgctcgtagttctcctgcgcacggcccaaactggcttccagcgagctccgcaggccctctcgctcctggcgctgctgccgggtccgaccctgtagcagcgcctcgtggcgcgcccgctcggcccggctcagctcccgcttctcccgctgcagctggccctcctgccgctgcttggcgcgggccgcgcgctgggcgcgctccctgcggatctgctcagcccgctcccgcccttcctgtagaccttcctcacgttgcttcaggttctgctcctgctgaagcttgcgcagccgatcctcccgggccgcgcgctccgcccgctcccgccgcaggaggccctggcgttcggccagctcccgccgccgctcctcgctgcgctcgtactgccgctgccg

SEQ ID NO: 5914 - DNA, 173 bp, Homo sapiens
  misc_feature 1..173: note = U/M: M (0.86:0.04) in Neurons + Oligodendrocytes
  misc_feature 1..173: note = source = chr14:70039093-70039265; Gene: CCDC177 (exon)
  source 1..173: mol_type = genomic DNA
cgccgcgccgcctcgcgctcttcgcggccacggcggcctcgccgctcctccacctgcgcggcccaggctcggcggccctgctctagggcgcgctgcttctcccgctcctcgcgctcccgccgctgcttggcgtgcacgcgctgcagctcccactggccgtgggcagccgcgcg

SEQ ID NO: 5915 - DNA, 364 bp, Homo sapiens
  misc_feature 1..364: note = U/M: M (0.8:0.05) in Neurons + Oligodendrocytes
  misc_feature 1..364: note = source = chr12:49659174-49659537; Gene: TUBA1C (intron)
  source 1..364: mol_type = genomic DNA
cggccatcagtggaaatggaaagccctcttgatcctagtgagggctttccccgcagggcccgctactgccctagggaggaaggtcagggagcctgctcattggcctccaagaacttaaactaaaaatccctccccacgttttctcaagcgacctctccttcctactgccttacaaactgggccccggaggccctcgtgcgctcccgcaccgacggtgcagcacttcctggctccccctctccagcgcccagtgactcgctgctgagtcacctgtggccctgccctggggagagcttccaactgcgccagtccacttgagaatggaggcaggcacctccttggaagggaataattaactttcacg

SEQ ID NO: 5916 - DNA, 297 bp, Homo sapiens
  misc_feature 1..297: note = U/M: M (0.88:0.16) in Neurons + Oligodendrocytes
  misc_feature 1..297: note = source = chr22:39437295-39437591; Gene: APOBEC3F,APOBEC3F (exon,intron)
  source 1..297: mol_type = genomic DNA
cgccattcctgaactctggaactgggagaattgaaccaaaggatgattagagcaatgtggaattttgttcacagtgctttgatggattttctgtaacatttactttgcttaaatagcaagtcttaggagagggtgtggggagggaatggtctctgaagcacaagataaatcgtatcttccaaggatgtctccactgtgggcagaggaggatgcagatgaccccaaacacacgctcctcctccactatcagcattcactgtttataaatgacacgagtaacatggaatatagtggccg

SEQ ID NO: 5917 - DNA, 160 bp, Homo sapiens
  misc_feature 1..160: note = U/M: M (0.89:0.18) in Neurons + Oligodendrocytes
  misc_feature 1..160: note = source = chr11:31840808-31840967; Gene: DKFZp686K1684 (intron)
  source 1..160: mol_type = genomic DNA
cgcaaccggccaggaggcagctccaggcagcccgtctgcccactcctcttagcccggacagctcctagctggacttgattttttgtcttgctcagcccgtcgaggactggagggcagagtaggggtgggagtgggggtaggggtagaggtgggggtggcg

SEQ ID NO: 5918 - DNA, 88 bp, Homo sapiens
  misc_feature 1..88: note = U/M: M (0.78:0.08) in Neurons + Oligodendrocytes
  misc_feature 1..88: note = source = chr14:24458196-24458283; Gene: DHRS4L2 (exon)
  source 1..88: mol_type = genomic DNA
cggaagtcggtgcggatggccagctccaggatgacccgccgggacccgctcacaaataaggtggccctggtaacggcctccaccgacg

SEQ ID NO: 5919 - DNA, 62 bp, Homo sapiens
  misc_feature 1..62: note = U/M: M (0.84:0.17) in Neurons + Oligodendrocytes
  misc_feature 1..62: note = source = chr2:25354646-25354707; Gene: EFR3B (exon)
  source 1..62: mol_type = genomic DNA
cgctgctgaggcagctgcggctcagcatcgactacgcgctgaccgggagctacgacggggcg

SEQ ID NO: 5920 - DNA, 349 bp, Homo sapiens
  misc_feature 1..349: note = U/M: M (0.76:0.09) in Neurons + Oligodendrocytes
  misc_feature 1..349: note = source = chr2:25354716-25355064; Gene: EFR3B (intron)
  source 1..349: mol_type = genomic DNA
cggcaccaagatcatcaaggagcacgaggagcgcatgttccaggaggccgtcatcaagaccgtgggtgcggcgcggggccgggccggggcggggcggggccgaggcgcggagtggggaggggaggggagggacgggacggggcccaggggctcaagactgaggcgcagggcggggtggggccaaggggaggaaagagggaccctggaaaggggcggggcaccgggggcggcccggggatgggggttggagagggagggaccgcactggggcgaagggcatccaaccgggcccctgtaggattgtccagcacccacatgctattcacggacctcggagagaatgaagtcg

SEQ ID NO: 5921 - DNA, 98 bp, Homo sapiens
  misc_feature 1..98: note = U/M: M (0.76:0.11) in Neurons + Oligodendrocytes
  misc_feature 1..98: note = source = chr17:47563733-47563830; Gene: NGFR (Intergenic)
  source 1..98: mol_type = genomic DNA
cgggcctgccaagggctggggccagaccggaaacgggatcatcttcgatcaagggctgtgggctctgctggttcctgctgcctgtgccggctcccccg

SEQ ID NO: 5922 - DNA, 367 bp, Homo sapiens
  misc_feature 1..367: note = U/M: M (0.67:0.02) in Neurons + Oligodendrocytes
  misc_feature 1..367: note = source = chr19:39898186-39898552; Gene: ZFP36,ZFP36 (intron,exon)
  source 1..367: mol_type = genomic DNA
cgggataaggcctcggtggtgggtaaactcagaacctccaactctgggttcctggcatccggaacccaggggtttctgcgggcgggtggggctcaggcggggagcccacaaaccggcctggcaagctctagttccctgcagctggggtggggcgtcgccctgcattttcaggtgccttaaccgacccatttccgcagagcctcctgtcgctgagccctgacgtgcccgtgccatccgaccatggagggactgagtccagcccaggctggggctcctcgggaccctggagcctgagcccctccgactccagcccgtctggggtcacctcccgcctgcctggccgctccaccagcctagtggagggccg

SEQ ID NO: 5923 - DNA, 208 bp, Homo sapiens
  misc_feature 1..208: note = U/M: M (0.63:0.06) in Neurons + Oligodendrocytes
  misc_feature 1..208: note = source = chr12:124246303-124246510; Gene: DNAH10 (promoter-TSS)
  source 1..208: mol_type = genomic DNA
cgtgggtgttttgctttattatgctctagtttggcaagaaagctaaagaactctgctccttccctgattttgtaggccatgaggaactcgtgctttctcggcttatttcctcctcgtctggcctctaatcccgcctctgccaccgccgaggtgctgtgaccttcgtctcgccaactctctagccccagcttcatctgcaaggtgggcg

SEQ ID NO: 5924 - DNA, 382 bp, Homo sapiens
  misc_feature 1..382: note = U/M: U (0.01:0.93) in Pancreatic Alpha + Beta + Delta cells
  misc_feature 1..382: note = source = chr1:11174802-11175183; Gene: MTOR (intron)
  source 1..382: mol_type = genomic DNA
cgtgttctcagaaggctgtaactgtcctgatcccatttggaagcagctcgttcccgatatccactcacctccatagcattggtcaacattcttgttagtctaaatggaatcttctctggaaacttctctcgggtcatagcaacctacagaataataaatgggaaaagccaaatcaatgtttattttctttacctggagccaggtggagcaggtggctttcctctgcatcacctgcactgattttaattatagcagggaaaggaagcagcttgggtttagtgagaggacttgtcacagggatttgaaagacaacttaaaaaaaaaaagaaacgaacaacagaaaagaagagaaaacaaaaaggaaaaaagacaaatgtgcatc

SEQ ID NO: 5925 - DNA, 326 bp, Homo sapiens
  misc_feature 1..326: note = U/M: U (0.03:0.95) in Pancreatic Alpha + Beta + Delta cells
  misc_feature 1..326: note = source = chr18:39584405-39584730; Gene: PIK3C3 (intron)
  source 1..326: mol_type = genomic DNA
cgatggatgtagaggactccttggagctgttatcctctcattacaccaacccaactgtgaggcgttatgctgttgcccggttgcgacaggccgatgatgaggtgcattattatttattattctgcttcaatgggtcattttaaactagagcctaattataaactatgtgtgtatgtgtgtgtgagagtgagagagagagtgtgtgcacatgcaagagagatttttagaagggaagaggatatactaggtgtattttcagaaggaaaattaaaatatgcctcagaggactcctctgtgaaatgaaaatttacttcctgatctgttac

SEQ ID NO: 5926 - DNA, 287 bp, Homo sapiens
  misc_feature 1..287: note = U/M: U (0.01:0.92) in Pancreatic Alpha + Beta + Delta cells
  misc_feature 1..287: note = source = chr15:73547092-73547378; Gene: NEO1 (intron)
  source 1..287: mol_type = genomic DNA
cgctaccgaaaggcctcccgaaagagtgatgtcactgagaccttggtaagcgggacacagctgtctcagctgattgaaggtaagctaccgtgcacaaaggcaaaaggtacactgtgtctttctcagatattgaattatgctagtctaatgactgctctgaactgtcgacttatacaaacaaatttaaaatggttcagaaaatttttaatggttcaatccacttctgacttgatagagattaatggaaaacactcttaaaggttctgctatttctgagtggtgagatc

SEQ ID NO: 5927 - DNA, 320 bp, Homo sapiens
  misc_feature 1..320: note = U/M: U (0.03:0.93) in Pancreatic Alpha + Beta + Delta cells
  misc_feature 1..320: note = source = chr1:65144855-65145174; Gene: CACHD1 (intron)
  source 1..320: mol_type = genomic DNA
cgaaacttgatccggttagcgcatatttattggacctggtgccttttatttcagtggttactctgtactaggtgacttttcctctcttccaagagtaactcataccccagggagctaggactctgttggtgttggatgctgcctgtgtaagcaattcttctggtctgctcactcttcccagcagtccttgccatttgtgctcctgctctgcctagcaaccaacactggagaaccaggaattaaatgtagcctccgctcccacgttcccatgcgtcatgtttgaggaactcaaagcctaactaagcatctgtttatcttcc

SEQ ID NO: 5928 - DNA, 401 bp, Homo sapiens
  misc_feature 1..401: note = U/M: U (0.01:0.91) in Pancreatic Alpha + Beta + Delta cells
  misc_feature 1..401: note = source = chr4:31066890-31067290; Gene: PCDH7 (intron)
  source 1..401: mol_type = genomic DNA
cgtcgtaacatccaggagagcaattcttcggtgaggtggaatgagcagcactttaatagcagtgcttagtggtaaggctgtctgagaggcagaaaagagattttaaattaaatggactttactgaaaattgtcttcactttgtagtttgaagtcagggatgcaattttcaactttcttttccctccacttacctgttgctaagagatcacattcagggtaaaattaatgcttctccaattacaaagcatgtagtcagcaaaggaaagaaaatgtaacatgcagtctgttggttagaactttaaaaaaataagtggcattagagagaaaatcatgcatataatagacatctaacaaatgagcattaagtcaatcagcacgtaccgagtagtaagtcttaaac

SEQ ID NO: 5929 - DNA, 263 bp, Homo sapiens
  misc_feature 1..263: note = U/M: U (0.04:0.91) in Pancreatic Alpha + Beta + Delta cells
  misc_feature 1..263: note = source = chr4:71762250-71762512; Gene: MOB1B (Intergenic)
  source 1..263: mol_type = genomic DNA
cgggcaatggtaaacttgatgtaccaagaaattcaattcagcatttattgagcaagtacaaggcccatgcaagaaactttttattttgagacaggttctcaccctgtcatccaggctgtagtgcagtgactggatcgcggctcacggccacctggaacttctgaactcaggcactccttctgccttggcttctcaagtagctgggactacaggtgcatgcccagcaattttttgttcttgtggagatagggttgccctatgtc

SEQ ID NO: 5930 - DNA, 122 bp, Homo sapiens
  misc_feature 1..122: note = U/M: U (0.05:0.91) in Pancreatic Alpha + Beta + Delta cells
  misc_feature 1..122: note = source = chr11:11409294-11409415; Gene: GALNT18 (intron)
  source 1..122: mol_type = genomic DNA
cgtccgcacctccatggagaatctggagtgggggctcaggactcagatggtcctgctgatgaatgatggtgagcctggcttgggcagctgggatcccggagagctccgggcagcattgctgc

SEQ ID NO: 5931 - DNA, 356 bp, Homo sapiens
  misc_feature 1..356: note = U/M: U (0.11:0.96) in Pancreatic Alpha + Beta + Delta cells
  misc_feature 1..356: note = source = chr8:30917044-30917399; Gene: WRN (intron)
  source 1..356: mol_type = genomic DNA
cgagcacgacagttttttaactttcagtacttaagatgttatatatagagctactgaacatactgtgtttattttaccaatttagggaaaaagtgcaaaaattatttaacctttaaatgcacctttatatttcattaaaaatatcaacatagtaatattgaataatggctatgatcggctctgttgtgtgtaattagtaacagttgtagcaaatgatccttaaaaaatgttctaactaaacattagaggccaggcgcggtggctcaggcctgtaatcccagcactttgtgaggccgaggcaggtggatcacaaggtcaggagattgagaccatcccggctaacatggtgaaacacc

SEQ ID NO: 5932 - DNA, 484 bp, Homo sapiens
  misc_feature 1..484: note = U/M: U (0.09:0.93) in Pancreatic Alpha + Beta + Delta cells
  misc_feature 1..484: note = source = chr17:17393032-17393515; Gene: MED9 (intron)
  source 1..484: mol_type = genomic DNA
cgataaggtatactgttaatggtgtctctcagttgagggcatcatttcctggcctctcatttcctggaagaagtgattgattctccataccctccctctgagtttagagctgttggtaaatactgagctggccatggtggccatctgatttgcaaggtgtgagacgtaactgatggatcgccaggaaagatggatattctgcctgcgtaagcagagaaatgatgaatagtaaacatgaattagcaccatctgggttgaaatttcccactacggatgaacatttatttgaaaaaattaatgatcattgacagtttttccctcttatgcctcaatggcttactttcagaacagcttactgaattgccttttagttttggtctcaaccacttgttttcaaaagctcatccacttactaacttttaaaaaacgtataggaagctgagtgtggtggctcatgcctgtaatcccagcactttgggaggcc

SEQ ID NO: 5933 - DNA, 100 bp, Homo sapiens
  misc_feature 1..100: note = U/M: U (0.11:0.95) in Pancreatic Alpha + Beta + Delta cells
  misc_feature 1..100: note = source = chr6:37954346-37954445; Gene: ZFAND3 (intron)
  source 1..100: mol_type = genomic DNA
cgtttaattagtgaaaacccgactacctcccaaccccgtctgtccagctttatgttgacctggcttttaaaatcatttatgtatttattttcgcattttc

SEQ ID NO: 5934 - DNA, 301 bp, Homo sapiens
  misc_feature 1..301: note = U/M: U (0.1:0.93) in Pancreatic Alpha + Beta + Delta cells
  misc_feature 1..301: note = source = chr8:134312641-134312941; Gene: NDRG1 (Intergenic)
  source 1..301: mol_type = genomic DNA
cgctgagcaccagatgaagtagttttcttagctaagtgtcacgctgcaggagaaagactgtctttagtacaggcctggatgcacataaagcatagaggacgcccaccctatacagaggcccctcactgggacctgggagctgcatgcacctccacatcccccaccgcagccagctgaggtggcagaagctcacggagctgaatgtgggtgcaattgcactgactgtttacattattcctctttctcgctggtcagcagtagaatcagatttgcttagtaaatgcacacgcgctgcaaatcc

SEQ ID NO: 5935 - DNA, 115 bp, Homo sapiens
  misc_feature 1..115: note = U/M: U (0.04:0.83) in Pancreatic Alpha + Beta + Delta cells
  misc_feature 1..115: note = source = chr10:135144629-135144743; Gene: CALY (intron)
  source 1..115: mol_type = genomic DNA
cggacccattagtgcattaaggcaggaggcgagtgctgtaacccggtaacagtgaaccactaaatccccacagcaaacctcactgaatgtgaatcctgaaagtgcctcgatctgc

SEQ ID NO: 5936 - DNA, 148 bp, Homo sapiens
  misc_feature 1..148: note = U/M: U (0.01:0.94) in Pancreatic Alpha + Beta + Delta cells
  misc_feature 1..148: note = source = chr1:54317669-54317816; Gene: YIPF1 (exon)
  source 1..148: mol_type = genomic DNA
cggcactgagcatgcctaacctattccctggcatttcagtccaatcagcgcatgctcgcaatgatcatccatgggtgaaaaggaagagctgaaagacacatgtgctgagcaacatttaatttctgcttgttaaacgggtgattaggcg

SEQ ID NO: 5937 - DNA, 235 bp, Homo sapiens
  misc_feature 1..235: note = U/M: U (0.01:0.94) in Pancreatic Alpha + Beta + Delta cells
  misc_feature 1..235: note = source = chr21:48072653-48072887; Gene: PRMT2 (exon)
  source 1..235: mol_type = genomic DNA
cgcaagtaaagataccacaggtgtcctagattgtcaacagaccatttaatcatttttgttaacaaagcaggtgacaattgagccctaatttgcgttatcattagttgttacaggatcttgcttgttctcctgaggccacgccacgatttccgagaagcaggttgcacactcagcagtctcccactagccagtggcactgcaggtgcaggggctgcctcctggacctttcaggacg

SEQ ID NO: 5938 - DNA, 205 bp, Homo sapiens
  misc_feature 1..205: note = U/M: U (0.02:0.94) in Pancreatic Alpha + Beta + Delta cells
  misc_feature 1..205: note = source = chr18:7994337-7994541; Gene: PTPRM (intron)
  source 1..205: mol_type = genomic DNA
cgctaatggaagagatagactccgttacaataacagatggggacttcaacaccaaacttgcttgcagcattagatagataacctagatagaaaatcaacaaagaaatattggacttaaactaccctacagaccacatggacctagcagacgttacagaacctttcatccgacaactgcagaatacaccttcttctcgtcagcacg

SEQ ID NO: 5939 - DNA, 225 bp, Homo sapiens
  misc_feature 1..225: note = U/M: U (0.01:0.93) in Pancreatic Alpha + Beta + Delta cells
  misc_feature 1..225: note = source = chr1:64259663-64259887; Gene: ROR1 (intron)
  source 1..225: mol_type = genomic DNA
cgctaatgcagttaggtaaaggcaagggccctggttgctggggaaccaggaagcacagggtgagcttcccatctgctctcagtgaaggacgtcctcactgtcaccgcttcctagggccaaaggggcctctgacaaagctaatgtgaccaaagtcaaaatatgggctccgagagtcagccaaacccattcaactaactgtgatcttaggcaaacctcaaagcttcg

SEQ ID NO: 5940 - DNA, 265 bp, Homo sapiens
  misc_feature 1..265: note = U/M: U (0.02:0.92) in Pancreatic Alpha + Beta + Delta cells
  misc_feature 1..265: note = source = chr10:114737328-114737592; Gene: TCF7L2 (intron)
  source 1..265: mol_type = genomic DNA
cgtgatgttagcaagtgtaaactgtacttcaacaagatggataaacccaattatggggcagacctgtagagagaaaatccatttaaatctcataatgttaagcagagctgtgtttaattcatttggaccaatttgggaatgatgtatgagtgttggtgaacattagtcaaagaggggaccacttgggggaaagggatgtgccgatgccgcaggccactcgggggaggcagctggggtgtcgtctcagcagcctgcactaatggcg

SEQ ID NO: 5941 - DNA, 158 bp, Homo sapiens
  misc_feature 1..158: note = U/M: U (0.06:0.95) in Pancreatic Alpha + Beta + Delta cells
  misc_feature 1..158: note = source = chr7:40132678-40132835; Gene: CDK13 (exon)
  source 1..158: mol_type = genomic DNA
cggctgtgcagagtgcatttgcagttctgttgactcagttaataaaggctcagcagtcaaagcagaaagatgtgctactagaagagagggaaaatggatcgggacatgaagcgtcattacaactcaggccacctccagaacctagcactccggtgtcg

SEQ ID NO: 5942 - DNA, 185 bp, Homo sapiens
  misc_feature 1..185: note = U/M: U (0.04:0.93) in Pancreatic Alpha + Beta + Delta cells
  misc_feature 1..185: note = source = chr2:170359492-170359676; Gene: BBS5 (intron)
  source 1..185: mol_type = genomic DNA
cgtgatttttataagactttagtagtttgtaattgttattttaacagtatttgcagttctcatggtacatttaatattgtctctgatgcattttaacatctgctgattttcagccccagccgctcgaagctctgacagtcgaacaaattcaagatgatgtagaaatagactctgatggtcacacg

SEQ ID NO: 5943 - DNA, 286 bp, Homo sapiens
  misc_feature 1..286: note = U/M: U (0.02:0.91) in Pancreatic Alpha + Beta + Delta cells
  misc_feature 1..286: note = source = chr11:66005140-66005425; Gene: PACS1 (intron)
  source 1..286: mol_type = genomic DNA
cgtggagctgtgagttgctgctcactcaggcctcgcaaccgagagagacagagagataacaaatttaaaacaaattaaaaaccaaaagagctagcaacctcaccaaatgccaggcaaacaaggagagaaggggagttgtatccaggaagccccagagtggcaatttgttcctctctgggaatcaaaagaagggcgcatagagaatcgggacagacttcagcaaacacagccttgctgtcgcggcagcctccaggcaaccacctgcaggcctgtgcggtagatttcg

SEQ ID NO: 5944 - DNA, 150 bp, Homo sapiens
  misc_feature 1..150: note = U/M: U (0.03:0.91) in Pancreatic Alpha + Beta + Delta cells
  misc_feature 1..150: note = source = chr19:19123447-19123596; Gene: SUGP2 (intron)
  source 1..150: mol_type = genomic DNA
cgttataagcttttcactaggaggcaagtgctatgaaaactgcctagtagtcattaaccgctcaacaaatattagcagattgtctctgtttatgctcatttcctgtgttataaaatcttccacaaccttatttggattacgtcgtctacg

SEQ ID NO: 5945 - DNA, 154 bp, Homo sapiens
  misc_feature 1..154: note = U/M: U (0.02:0.9) in Pancreatic Alpha + Beta + Delta cells
  misc_feature 1..154: note = source = chr2:205584910-205585063; Gene: PARD3B (intron)
  source 1..154: mol_type = genomic DNA
cgagccagcagaaatgatccatatactgaataacatctcgtttggagttgcttggtaacggatagaagctacattaggtctgttgccacgtgagaatccttggtgcttttgccagtccatgatgtagcttttgtagtcatggccatgaactgcg

SEQ ID NO: 5946 - DNA, 196 bp, Homo sapiens
  misc_feature 1..196: note = U/M: U (0.01:0.89) in Pancreatic Alpha + Beta + Delta cells
  misc_feature 1..196: note = source = chr13:26322725-26322920; Gene: ATP8A2 (intron)
  source 1..196: mol_type = genomic DNA
cgcggtttgatctctttcttgtgctttcagtgctggtaaattaatcaaaagaagttactgctctgctgggcattagcatgggtttagatgtttctgcttcagggcctgttcatcaactaaaatgcttttaagccccaaatggagagtaaacagcgttgctgcggccactttgaggtgagccattacttgtgacccg

SEQ ID NO: 5947 - DNA, 221 bp, Homo sapiens
  misc_feature 1..221: note = U/M: U (0.05:0.93) in Pancreatic Alpha + Beta + Delta cells
  misc_feature 1..221: note = source = chr4:186297020-186297240; Gene: LRP2BP (intron)
  source 1..221: mol_type = genomic DNA
cgctgaggaagcatgctctcagccatggtgctctgccatcctcagagtaacaggcgcacgatgagccctcagcaaacatttgttgccaggatagacgaaggtgccatcgaaaagtgagagagtaagtgggatataggtgaacagctgcccaaatagtcaacaaatggtgaaagacagtcagtcccttttcaagtcttcccggggaagtcaatgaaaaaccg

SEQ ID NO: 5948 - DNA, 323 bp, Homo sapiens
  misc_feature 1..323: note = U/M: U (0.02:0.9) in Pancreatic Alpha + Beta + Delta cells
  misc_feature 1..323: note = source = chr12:114336393-114336715; Gene: RBM19 (intron)
  source 1..323: mol_type = genomic DNA
cgctgcatgaaaacgggtgtttgatgaccggcaagactcagagaagcaagaggtctaatcgtgctgaaccagcaaatgaagccttcaatttggtattctcatcctgcacaagcacttacttatgcaaacaggcattctctgcattagtattactgacgtaaaagaaccgaaacagattatagatctggacctgaggctacatctttctaatattaaaaacccacattctgaatttagtttctgcaaaacgacatcatccatcacgctaaaataatgttgttaatttgaattttattgagtttaaattttgtttgtatttaacg

SEQ ID NO: 5949 - DNA, 169 bp, Homo sapiens
  misc_feature 1..169: note = U/M: U (0.03:0.9) in Pancreatic Alpha + Beta + Delta cells
  misc_feature 1..169: note = source = chr3:45508353-45508521; Gene: LARS2 (intron)
  source 1..169: mol_type = genomic DNA
cgcctgccaccatgcccggctaatttttgtatttttagtagagacggggtttcacctgcattgtttacccctgctcttggggacagttcccaagcaactgagtatttctgagaatcatgtgcagacaatagccagtcagcgtgtgttgcaggaaggcagcacattagcg

SEQ ID NO: 5950 - DNA, 357 bp, Homo sapiens
  misc_feature 1..357: note = U/M: U (0.06:0.93) in Pancreatic Alpha + Beta + Delta cells
  misc_feature 1..357: note = source = chr1:12333781-12334137; Gene: VPS13D (intron)
  source 1..357: mol_type = genomic DNA
cgatacttccttccttcgtatagccgaataatagtccatcgtgtggctgttccgcgttttgtttatcctttcatttgttcatggccatttgagttgcttccactcttttgctattaggcatattgctgctgtgagcattcatgtacaggtttttgtataaacatatattttctttttcttttaaattttttttcttttttatagacccccatttctgcaatgtagacatatatttttaattctttatttacctagaagtggagttgctgagccatgtggtaactctatgttttaatattttgaggaagtaccaaattgtttttgtttgtttttttgagatggagtctcactctgtcg

SEQ ID NO: 5951 - DNA, 21 bp, Homo sapiens
  misc_feature 1..21: note = U/M: U (0.04:0.9) in Pancreatic Alpha + Beta + Delta cells
  misc_feature 1..21: note = source = chr7:158165892-158165912; Gene: PTPRN2 (intron)
  source 1..21: mol_type = genomic DNA
cgcccgtacgctgcggaatcg

SEQ ID NO: 5952 - DNA, 235 bp, Homo sapiens
  misc_feature 1..235: note = U/M: U (0.05:0.91) in Pancreatic Alpha + Beta + Delta cells
  misc_feature 1..235: note = source = chr4:78121467-78121701; Gene: CCNG2 (Intergenic)
  source 1..235: mol_type = genomic DNA
cgacatgaacagtttgaccaaagatgagcttgagactggccagacatgtgacctaatggaagataattattgtacacatacacctgtaactgcccttgaataatgaatcagtcttgacggaaataaagcctagcaacagcaaaggacccaatgcacgggaaaactcgctggtgtccatttgacttaggctgagagaaacatgctgaactcccagctgtcagtttgtcacctgccg

SEQ ID NO: 5953 - DNA, 239 bp, Homo sapiens
  misc_feature 1..239: note = U/M: U (0.05:0.91) in Pancreatic Alpha + Beta + Delta cells
  misc_feature 1..239: note = source = chr19:5940287-5940525; Gene: RANBP3 (intron)
  source 1..239: mol_type = genomic DNA
cgatacagcaagcatggttcagcagtgggcagtgagggggaaggaataaaatcaacgagcaggaagtggagctccctcattccacagaacacctatccacaggtgcaaagatccttaaattaaaaggatgccaactgcagcctggactgcaagccatctggacagttccgcaatatccagtcagcagatgacagtgtaatagcactggaaaacctaatgcagctgtgcaaaaagacgcg

SEQ ID NO: 5954 - DNA, 263 bp, Homo sapiens
  misc_feature 1..263: note = U/M: U (0.01:0.87) in Pancreatic Alpha + Beta + Delta cells
  misc_feature 1..263: note = source = chr16:20792346-20792608; Gene: ACSM3 (intron)
  source 1..263: mol_type = genomic DNA
cgggctgggcaaagtctgcatggagtagtgttttttctccgtggatccagggagcatgtgtattcacacaccatttaccccgttttgagccgacttctatcttgcaagtaagccaaagcacaaagaggtcaatatttagaaatgcattaagcagtatggctgacagaactggtgaataaagcaacttgcagagatcagagtagacaatatgatttaagatatgtcacatccagaaagtcaataagcctgaaaagatacactcg

SEQ ID NO: 5955 - DNA, 348 bp, Homo sapiens
  misc_feature 1..348: note = U/M: U (0.06:0.92) in Pancreatic Alpha + Beta + Delta cells
  misc_feature 1..348: note = source = chr5:126422538-126422885; Gene: C5orf63 (Intergenic)
  source 1..348: mol_type = genomic DNA
cgctgtacgtgtgtgtgtctcctatgcccagactacaaggttattcatcttttagtcctgctatacctgggacaaagctgagcacataatattcacttaagagatgtttgtttgaataaatggatggatgactaaatgcataggaacaaatatcctgtgacgcttagttcatgggagaatgaaaaacttgttgaaaatgcaattttatttcatatatacgccattagtgtattttatataataaaatgtagaaaggcacatacttttagcttgatattaatcactacctcttacttaaacagtcaaatgggatttgctgcccagcagttaaatattttgctatcctcg

SEQ ID NO: 5956 - DNA, 411 bp, Homo sapiens
  misc_feature 1..411: note = U/M: U (0.05:0.91) in Pancreatic Alpha + Beta + Delta cells
  misc_feature 1..411: note = source = chr11:134113934-134114344; Gene: VPS26B (intron)
  source 1..411: mol_type = genomic DNA
cgccacagatttagctgcctgcagctctggggacacgcgggtgttaccatgccaggcccttggagggttgggaccaagctctcctgacactctctgatgtcccattttgtcactggctgtgcaaatagagccagctgtcatttttcctgtacaaatgaaatgggtcactgagaatgcatgtaaaagagcagataatgataagatggcttatatttagctttagaccacattataggtttggcctttcttggtagaattactgccctaattttgttccactgatactagaaacggtctgatgttagagctggaagggatctgtagtatcacgcagtccgattctctaattttccacatgagaaaatgaaggtccagaggaagcagagacttaactcacaaatcagaaaagcg

SEQ ID NO: 5957 - DNA, 106 bp, Homo sapiens
  misc_feature 1..106: note = U/M: U (0.08:0.93) in Pancreatic Alpha + Beta + Delta cells
  misc_feature 1..106: note = source = chr10:34587539-34587644; Gene: PARD3 (intron)
  source 1..106: mol_type = genomic DNA
cggctgatgggtacagagtttcgcaagacgaaaggcgttctagaaactaatggtggcggtgaagtgcacaacaacgtgagcacacttactgctgctgaactaaacg

SEQ ID NO: 5958 - DNA, 137 bp, Homo sapiens
  misc_feature 1..137: note = U/M: U (0.07:0.92) in Pancreatic Alpha + Beta + Delta cells
  misc_feature 1..137: note = source = chr6:42828307-42828443; Gene: GLTSCR1L (intron)
  source 1..137: mol_type = genomic DNA
cggataaggaaaccagggctttggttaagtaacttgctcgagaacagatggctaagaagtttgcagagtaattagcagagctcggatacgagccaggatcatctgacccctggtccacactctgatgccatctaccg

SEQ ID NO: 5959 - DNA, 157 bp, Homo sapiens
  misc_feature 1..157: note = U/M: U (0.02:0.87) in Pancreatic Alpha + Beta + Delta cells
  misc_feature 1..157: note = source = chr2:240192453-240192609; Gene: HDAC4 (intron)
  source 1..157: mol_type = genomic DNA
cggatacgacagatgtgagcgttactgtgagcagcacgtgcagacttaagtggctcttagttcaaaccaaaatatgcacagacctccaaaaaaccccagatacagagtaaattatacactggtaggctagcttttggcaaggaaaatacagtgtccg

SEQ ID NO: 5960 - DNA, 193 bp, Homo sapiens
  misc_feature 1..193: note = U/M: U (0.02:0.87) in Pancreatic Alpha + Beta + Delta cells
  misc_feature 1..193: note = source = chr16:421807-421999; Gene: TMEM8A (exon)
  source 1..193: mol_type = genomic DNA
cgaggagaggtgcgtgtgagggaggggtggccctctcctcagtaggaggaagtaagagggtatctaggccaatttattcagctggaaatcaatctgtccagggctggaccaggcgcctccccctcgatacagctcctggctgaagaggtcatcagagcagcagctgtccccaggccagtgtcacgtcactgcg

SEQ ID NO: 5961 - DNA, 355 bp, Homo sapiens
  misc_feature 1..355: note = U/M: U (0.07:0.92) in Pancreatic Alpha + Beta + Delta cells
  misc_feature 1..355: note = source = chr1:28178026-28178380; Gene: PPP1R8 (TTS)
  source 1..355: mol_type = genomic DNA
cgtaacttttgtcatttgggtgcaggctgtgaatttgtctctcagtcactgattgccactgccatctggaaatgtttgctaaaggcacagtcactgggcttgggaggcaatgctccatccccattatattacaaataaagatgccctaaatgagtgtggaaattctaatgagagaatgtagtccccagactgaagcctcacaaagcagcgttggttcggaagtgcttggtgcccttcatcaggagacctcatgacgggagacggggctttagggcgtttgcataagccctatcacccaccctgcagttagagctctgtgcatttgagccatagcttggtgacacaggagcaaacg

SEQ ID NO: 5962 - DNA, 454 bp, Homo sapiens
  misc_feature 1..454: note = U/M: U (0.04:0.89) in Pancreatic Alpha + Beta + Delta cells
  misc_feature 1..454: note = source = chr5:58168362-58168815; Gene: RAB3C (Intergenic)
  source 1..454: mol_type = genomic DNA
cggatgtgtccgtggccagcttaatgttatagatctttttcagaaatatcgaatctattgactggatttgatattggttggaaagaaaccaatagccaatcattattaaaaaagcgtgttttaccgatgcttgacatgtaaattggtattctgcaaagtgtgttttgcttcttaattacttaatctttcaaacaaaaatcaagtcctaggtaatttttctaccttattagctaagaatgactttcgatacaacagacaaactctcatacccactaaactcaggacagcaatgaggctaatggacttctgggaagactgccatgaaaacagagcttccattatgttgtctggcctcactcctcccatgactcctctcaggtgtgcagacactctgacacctccgactcctgtaggctttgcagggggagctccccaaactgctcaatacaaagcg

SEQ ID NO: 5963 - DNA, 455 bp, Homo sapiens
  misc_feature 1..455: note = U/M: U (0.04:0.89) in Pancreatic Alpha + Beta + Delta cells
  misc_feature 1..455: note = source = chr12:84198025-84198479; Gene: SLC6A15 (Intergenic)
  source 1..455: mol_type = genomic DNA
cgggaaggacaaagctactgaaaattttattataaaagaaagcatagaattgtaaggaaattgttatagcatatttagtttatctaagagtgttacatgttctcctttagtcagcaggagtacagctttttgcctatctaaaggattcctagattaatacaaatatttggtctatggttttgcccaaagaaattgctgtttgctaagtgacgaaaatgaaattggtcgcacatcatctagaaaagatgcaacccatgtactttttaaatgctttgtaaattgctattgctaattgaggacagatgcttctatggacattggttaggttaaattatttaagcaatccagaaattgtagatttagcaacaggatgtacctgcccaggtatcttagcttgctattgatctcatcgaaaggcactggcagattaaaccatttttgatttttagcaaccg

SEQ ID NO: 5964 - DNA, 135 bp, Homo sapiens
  misc_feature 1..135: note = U/M: U (0.03:0.87) in Pancreatic Alpha + Beta + Delta cells
  misc_feature 1..135: note = source = chr12:20492456-20492590; Gene: PDE3A (Intergenic)
  source 1..135: mol_type = genomic DNA
cgtaaggaaacagtacaatttccattaatgttctcagccacagctatctaacatgtaagataaacatgtagaaaggcctataacgtaacagttaacgtcatggaaactagagccacgctggctaggttaaaatcg

SEQ ID NO: 5965 - DNA, 155 bp, Homo sapiens
  misc_feature 1..155: note = U/M: U (0.08:0.92) in Pancreatic Alpha + Beta + Delta cells
  misc_feature 1..155: note = source = chr16:1683343-1683497; Gene: CRAMP1L (intron)
  source 1..155: mol_type = genomic DNA
cgcagctagcttctccactgaagaacctccactgggagattgtcaccgtttctggagatccatggaaacggctgttggtctctgcacattaggggtaccccttgattcgggtctgccgccgatgcggttttgtttgtttgcttttggtatccacg

SEQ ID NO: 5966 - DNA, 279 bp, Homo sapiens
  misc_feature 1..279: note = U/M: U (0.04:0.88) in Pancreatic Alpha + Beta + Delta cells
  misc_feature 1..279: note = source = chr12:131280340-131280618; Gene: STX2 (intron)
  source 1..279: mol_type = genomic DNA
cgcccagcctgtgcttgttctcagtaaacacagtggctgggcactcgaatcagcacacaggcagatgtatcactagatggcattatctgtactgcgtggctggcaagcttttattagttttatgtctattacaattaagcaaatactattattggttaattgcaaaagttaataagtaaattagttgatgagttacttactcccaccctggcagagaggcatgcacactgacgttatccacaccatcatttgccaactgacaagccaataattagagcg

SEQ ID NO: 5967 - DNA, 306 bp, Homo sapiens
  misc_feature 1..306: note = U/M: U (0.02:0.86) in Pancreatic Alpha + Beta + Delta cells
  misc_feature 1..306: note = source = chr6:117867838-117868143; Gene: DCBLD1 (intron)
  source 1..306: mol_type = genomic DNA
cgggttctgtctcacccccactcaccacagtctctcccctaaacagtcccacaccctccccaacttccagcagtgcccttccctgcatgtttgtccatgctgcttctcacacccagacttccctctcagtccccagtccataattctcagcagcctgctggacacctccacctgcagatgtcacccgttcctcagcaaccacaatcgaatccattgttcctaaccctcaccacagatgctctgtgcattccttgtctaatggcttctcgactgcacatcccagcctcaaagagtccttgcctcccg

SEQ ID NO: 5968 - DNA, 465 bp, Homo sapiens
  misc_feature 1..465: note = U/M: U (0.1:0.94) in Pancreatic Alpha + Beta + Delta cells
  misc_feature 1..465: note = source = chr2:118705617-118706081; Gene: CCDC93 (intron)
  source 1..465: mol_type = genomic DNA
cggaggtaaaccaagagattcaataagcgtcctggtttatttgctgacaccaaacaacacttactcgacaatgtgctttaaattcctgttcttgacttttcagattttcattcatggctacaagtgctctcaggttctgtaggatactgaagagaaaagacaaaaaaatgacatatggcaggccattatgattttatgaatcgcagctaaaagcaggtccgcagctaaaaaaggactctccttttaatttcctttctcagctctaagagtgtctcacagattctgcacaaatgataatgacttccatttaactgacattattattcatttataaacccaagaccatcaatgccggatccaagaaaacattacagattccacaattaaaatgtcaactatagaaacatcaatgagtttcaatagtaccaggtatatttaatgataccaattattcaactgtattcg

SEQ ID NO: 5969 - DNA, 188 bp, Homo sapiens
  misc_feature 1..188: note = U/M: U (0.03:0.86) in Pancreatic Alpha + Beta + Delta cells
  misc_feature 1..188: note = source = chr3:130796159-130796346; Gene: NEK11 (intron)
  source 1..188: mol_type = genomic DNA
cgtattaagtgatatgcaatgagagtttcctctgtcagctcagtgacgtgattttaggtaaggaaggtgaacgtctccgcatcagctagagagattataatagatatcacctgtcttaatagccctaccttcatctgctaaactgtggacaaatgagattttatgctttatcatcaaggtgccagacg

SEQ ID NO: 5970 - DNA, 258 bp, Homo sapiens
  misc_feature 1..258: note = U/M: U (0.09:0.92) in Pancreatic Alpha + Beta + Delta cells
  misc_feature 1..258: note = source = chr8:17181976-17182233; Gene: MTMR7 (intron)
  source 1..258: mol_type = genomic DNA
cgcacatgcatccatgctcttcctctagcctctgcctctgcgcttagtgttggacggtccagatgggcagatcccatccagcacctgagcagctgtgtttgaaatcctcatacaacaccagagaggcaaaagcacacatacttgatccatttccttcttctaaatgaccatgtcgatagccagtgaagcctaacaggctgctggtctagcagaacacttgttaataggccatacaaactgctatttccatgtagagcg

SEQ ID NO: 5971 - DNA, 465 bp, Homo sapiens
  misc_feature 1..465: note = U/M: U (0.05:0.88) in Pancreatic Alpha + Beta + Delta cells
  misc_feature 1..465: note = source = chr18:54594071-54594535; Gene: WDR7 (intron)
  source 1..465: mol_type = genomic DNA
cgtgacacactcggcagagggtgcagagcctgagatggtgggaagtggagcagcaatgtgtgcagagggttaagtgtggatcttacccttgtgctgccctgttgggctgcccctttttgtgcctgatttactgtgtacacagtaacggtgctcagccgccttgcttctgtctgtgatgttaagcttgctttatgaagaagcttttatgttaggcctgtgctttttaaaatttcagttcacgtttattgaaaaagaaaaaaaaacataagcagtgtttcctactttcttcttattcttgtgagtttatgagggcaggggttttgcggaggggcaaccaatcaggtcccctgccttgtctagagaacacatatcatggcagagttcccttttgcctctcccccatgtcccgacatctcctgctgagctgactcctaagaggtctcctaaaacactgtatatgcctcg

SEQ ID NO: 5972 - DNA, 99 bp, Homo sapiens
  misc_feature 1..99: note = U/M: U (0.1:0.92) in Pancreatic Alpha + Beta + Delta cells
  misc_feature 1..99: note = source = chr20:1155772-1155870; Gene: TMEM74B (Intergenic)
  source 1..99: mol_type = genomic DNA
cgcctagctcagggaggaatgcagattgtgtgtgaatgaacgaacgaacgaaccaacacaaatagctgacatcaagcaattatggggtgccaggcaccg

SEQ ID NO: 5973 - DNA, 108 bp, Homo sapiens
  misc_feature 1..108: note = U/M: U (0.02:0.84) in Pancreatic Alpha + Beta + Delta cells
  misc_feature 1..108: note = source = chr10:109954063-109954170; Gene: RNU6-53 (Intergenic)
  source 1..108: mol_type = genomic DNA
cgaatgatttgattagcgcacagaaggatgtcttaatggccgcacgtgctcagttaaatttcctccagctttgcagcttgtcaccctggtcctcttgtctattcaccg

SEQ ID NO: 5974 - DNA, 214 bp, Homo sapiens
  misc_feature 1..214: note = U/M: U (0.11:0.93) in Pancreatic Alpha + Beta + Delta cells
  misc_feature 1..214: note = source = chr21:48069403-48069616; Gene: PRMT2,PRMT2 (intron,exon)
  source 1..214: mol_type = genomic DNA
cgtgatgctggttgtgactcaggagagtagatgacgggccgtgtgccggccggatgtacgctgacggtgcctctgctgctgcaggtgtacgcggtggaggccagtgagatggcacagcacacggggcagctggtcctgcagaacggctttgctgacatcatcaccgtgtaccagcagaaggtggaggatgtggtgctgcccgagaaggtggacg

SEQ ID NO: 5975 - DNA, 244 bp, Homo sapiens
  misc_feature 1..244: note = U/M: U (0.09:0.91) in Pancreatic Alpha + Beta + Delta cells
  misc_feature 1..244: note = source = chr3:42157546-42157789; Gene: TRAK1 (intron)
  source 1..244: mol_type = genomic DNA
cgttgttcagcaaacatttattgaacacttactagttaccaggcagggttccgggtgctgggcaaacagcggaaagcgaatcagcatctggaggtgctgtcgctacatcccgaggcctcttgcatggtgggacctgccgcaggccaagcacccatctcgagtctgctgctggtttgctctgtgacatttggccacctcctcagcttgaacacagtgtccttttccattcaatgaggaggttgcg

SEQ ID NO: 5976 - DNA, 245 bp, Homo sapiens
  misc_feature 1..245: note = U/M: U (0.06:0.88) in Pancreatic Alpha + Beta + Delta cells
  misc_feature 1..245: note = source = chr17:28537689-28537933; Gene: SLC6A4,SLC6A4 (exon,intron)
  source 1..245: mol_type = genomic DNA
cggtggaggctttgggacaaggctgtggccttcaggacagtgaacaggagggaggggtaaggttgctaagtgactggtcaagctgatcatcaccagttccccggctcgctggaccatgtaagcatctcaaagagtatttccctgttttacactgtcatttaaagcccatcactaaggagagccaggaaacaaaatagcacacgtggacagaacttcaatatatgaggtctctcggggagactccg

SEQ ID NO: 5977 - DNA, 264 bp, Homo sapiens
  misc_feature 1..264: note = U/M: U (0.07:0.89) in Pancreatic Alpha + Beta + Delta cells
  misc_feature 1..264: note = source = chr15:52962514-52962777; Gene: FAM214A (intron)
  source 1..264: mol_type = genomic DNA
cgtatgttaagtgccaaaccatatgttctcagtttacctttcccacaaggcttaaggttgacggtattagagcaaaaaacaaaaccgttgttcagaaaggctatgtaattttttcaaggtaatttggctggtaagttccgaagttagaatttcaatccaaatttgatcctaaaagcttagtgtcttaacttttcttgcattatagtacgctgctaaaaggaaaccatttaaactaaaatatgaccatcatttcaacagtcctcg

SEQ ID NO: 5978 - DNA, 297 bp, Homo sapiens
  misc_feature 1..297: note = U/M: U (0.07:0.89) in Pancreatic Alpha + Beta + Delta cells
  misc_feature 1..297: note = source = chr15:89086735-89087031; Gene: DET1 (intron)
  source 1..297: mol_type = genomic DNA
cgaaactggccgacctgatcttcaagatgtggccctagagaaggcggacgccgctgtgttcacagatggtagcagctttctcaagcagcgagtatgaaaggccggtgcagctgttaccacggagacagatgtgttgtgggctcaggctttaccagcaaacacctcagtgcaaaaagctaaattgatcgccctcactcaggctctccgatggggtaaggataaacgtattaacatttacactgacagcaggtacgcctttgctactgtgcatgtacatggagccatctaccagaagcg

SEQ ID NO: 5979 - DNA, 310 bp, Homo sapiens
  misc_feature 1..310: note = U/M: U (0.02:0.84) in Pancreatic Alpha + Beta + Delta cells
  misc_feature 1..310: note = source = chr2:131483184-131483493; Gene: GPR148 (Intergenic)
  source 1..310: mol_type = genomic DNA
cgtcagttctttgtgtattacctctgccacacatgcatgtacccaggtgcaatgatgagggcccgggggcgggggggctggagattttctctgctcctgcagctaggtcaggtgacatggccagttgctgagggacattgcattgctgccaggaaaccaagaacccctgtttagataatccttttcaacctggctgccagctgcctttgggagctgctgtgtgatgggaggcccagctgggagtctcagtcacctctgccagtgcccactgcccaccctctgactccccgagccttgacctgacaccacg

SEQ ID NO: 5980 - DNA, 332 bp, Homo sapiens
  misc_feature 1..332: note = U/M: U (0.1:0.92) in Pancreatic Alpha + Beta + Delta cells
  misc_feature 1..332: note = source = chr14:103921549-103921880; Gene: MARK3 (intron)
  source 1..332: mol_type = genomic DNA
cgtttaatttttttaagtgaaaactctcctatatgatattcactcatgtttagttgtttttgcttattaaccacttgttttgacattgtgtgcttttctgcaaataggtcattcgcatagaaaatgctgacactttaccgagctgacatttaacttcataattcatcatagttaagtgaattgtgtcgtgtaaacttgacagtatgtaatgccttttaaaagatcattatgcaggctgggcacggtggctcacgcgtgtaatcccagcactttgggaggccaagacgggcagatcacttgaggccaggagttcgagaccagcctggccaacg

SEQ ID NO: 5981 - DNA, 362 bp, Homo sapiens
  misc_feature 1..362: note = U/M: U (0.05:0.87) in Pancreatic Alpha + Beta + Delta cells
  misc_feature 1..362: note = source = chr4:26132649-26133010; Gene: RBPJ (Intergenic)
  source 1..362: mol_type = genomic DNA
cgtgaggattgattctcccatctttttctgccatccaagctacggtctagtcttcatttgtgcaacatgccaactggcctcagcttatcagaaacgcatcatttacatatcgaggctccctgcgttcttttctcattagcctgtgataatttaggttgagtgccattgtgataaaaacacagcacaggcggcggaagctgtggcactagtaggttactaggttacaaggtggttgccatgtttttcaaactgggtcacatccctatgcagtcacatccctgcatcatgagatcaatttagtaagctgttacaagcaattttttaaaaaatgttacagaaaagagaaaatatcaagtattacg

SEQ ID NO: 5982 - DNA, 161 bp, Homo sapiens
  misc_feature 1..161: note = U/M: U (0.14:0.95) in Pancreatic Alpha + Beta + Delta cells
  misc_feature 1..161: note = source = chr1:55549922-55550082; Gene: USP24 (intron)
  source 1..161: mol_type = genomic DNA
cgttacttcttcacataatcacagatgcaaagaataaaaaacacagacacaggcataggggctggaaaccaagccgatggagcaaatggatagcaacagcctgacagaatgacaacggtgatatcgactcagccgtgaacttacttgagagcccgctgacg

SEQ ID NO: 5983 - DNA, 165 bp, Homo sapiens
  misc_feature 1..165: note = U/M: U (0:0.81) in Pancreatic Alpha + Beta + Delta cells
  misc_feature 1..165: note = source = chr5:133135556-133135720; Gene: C5orf15 (Intergenic)
  source 1..165: mol_type = genomic DNA
cgacacgtgccatgtaccaactccccacacttctcaaggaggaaaggcacctggtgatgttctgcagttcatcccctgcagcacctgagcacccttctctctcagcatacatccctgcctgctggaggaaagccagggacctgcacgaaacatcagcacgcggcg

SEQ ID NO: 5984 - DNA, 220 bp, Homo sapiens
  misc_feature 1..220: note = U/M: U (0.1:0.91) in Pancreatic Alpha + Beta + Delta cells
  misc_feature 1..220: note = source = chr10:32399766-32399985; Gene: KIF5B (Intergenic)
  source 1..220: mol_type = genomic DNA
cgtggtgttaagaaggtaagtagctcagcatttttcaaattagatacatatgaagcatctggcttagtgtgaggtacatatcagctgttcagttattgctgggtcagcaaccctattaagttgtataaatagagaagcagtgggggtgtcagggcacaacccaggcagcagcggcggccacagcgtttatccgcctgtggaggatgaggcatcctcggcg

SEQ ID NO: 5985 - DNA, 256 bp, Homo sapiens
  misc_feature 1..256: note = U/M: U (0.02:0.83) in Pancreatic Alpha + Beta + Delta cells
  misc_feature 1..256: note = source = chr17:43090995-43091250; Gene: C1QL1 (Intergenic)
  source 1..256: mol_type = genomic DNA
cggcccctatcctggcgaagtggtcattagtctgcctcccccagagagcccctgctggggcactgtaatgcctcagaggccagaaagttgctcccacccccagcaaaaggggggctctgccctgtatttctcaggggctcacttcaccttctgcctccagaggtccctcctcactatcacagggagggggcaggggtcggggcagaagctcctatcctgtgggcttctcattccagatctctgctggcccggtgcg

SEQ ID NO: 5986 - DNA, 337 bp, Homo sapiens
  misc_feature 1..337: note = U/M: U (0.11:0.92) in Pancreatic Alpha + Beta + Delta cells
  misc_feature 1..337: note = source = chr2:192584628-192584964; Gene: NABP1 (Intergenic)
  source 1..337: mol_type = genomic DNA
cgtcatctttgatccaggtttgctttgtggcaactcctttaactcacttgcccaacatttgagggttcatttagctaaaacgacaagatgatacagtggaacgtggttggagtgctagtcaggtaaaaccttaggttttatccattcgtttgagactcgagctcgctttctgtgatggttgacatatggtgctgcattaatttccaggggccgatttccttactgaatagccacgtcagcaaatttcagaccaacctggctgctctatcaggcacagattaatgacaatataatacaatatgccggaggcaaacgaacaacccgggcaccactgccg

SEQ ID NO: 5987 - DNA, 498 bp, Homo sapiens
  misc_feature 1..498: note = U/M: U (0.11:0.92) in Pancreatic Alpha + Beta + Delta cells
  misc_feature 1..498: note = source = chr8:141166206-141166703; Gene: TRAPPC9 (intron)
  source 1..498: mol_type = genomic DNA
cgatgcagacagctgggtgaatcagaagagaaccaccacaacaccaggctaccatccgcatgctcaacacctcccgccaccacctgcttcgtgtagcctatgatcccctgaagaaaatgataaacacacagacatctggcagcaccaacctgggagcaaggtgacggaagcattcaatgcaacctggacattcactagttatgtaacttcagtgcaatcatttaacatcttaaagcctcagtttctgctctgaaaagtgaaaataatgataatgctcccacacggggatcctgcgaggctcaaatgaaaaatggatacaaaagtactctgtgaaacttgggttattatcactgcaagtagaaatactaacaaattattttttaattacatatttattttccttcttctatcatacaagagaaagaccacatgattcctgaaagaaatctggccatagcctgtctctgcagcgggagcctcggagttctgtaatattcg

SEQ ID NO: 5988 - DNA, 103 bp, Homo sapiens
  misc_feature 1..103: note = U/M: U (0.12:0.92) in Pancreatic Alpha + Beta + Delta cells
  misc_feature 1..103: note = source = chr17:57483062-57483164; Gene: MIR4729 (Intergenic)
  source 1..103: mol_type = genomic DNA
cgcccgcttcggcctcccaaagtgctgggattacaggcgtgagccaccgtgcctggcgagttatatttattttcaattaaaataatgttaatgatgtatcccg

SEQ ID NO: 5989 - DNA, 208 bp, Homo sapiens
  misc_feature 1..208: note = U/M: U (0.04:0.84) in Pancreatic Alpha + Beta + Delta cells
  misc_feature 1..208: note = source = chr10:5676954-5677161; Gene: ASB13 (Intergenic)
  source 1..208: mol_type = genomic DNA
cgggatttggattcacaccaagaacggagggacttttctttgttgatcactcagagtgcagatggtgaagctaagtgcacatcctggctcagcgtccagtggcagattctccccagccatgaagtccgtgtgcacaacaaccgcacacctggaggccagatgctagagtgaaattgtatttgaacgaataaatgtgtacacaggtgcg

SEQ ID NO: 5990 - DNA, 310 bp, Homo sapiens
  misc_feature 1..310: note = U/M: U (0.11:0.91) in Pancreatic Alpha + Beta + Delta cells
  misc_feature 1..310: note = source = chr10:97043316-97043625; Gene: PDLIM1 (intron)
  source 1..310: mol_type = genomic DNA
cgtgtgcggaaaaagtctggaaaggtttgcagccagctgttcactgtgtttacctctgtaaagtaagactggggaagccttttaccttatgctttctgtaggtttatattgtccgatcttttaaacaattacgcgggcttctatgtaacctttactgaaggatgacatgtatacagcacaaatggtaacgatacagctgattgaattctcacatacagagcacacccaaggaaacagcatgggataaagaagaggacattacctgaactgctaaacctccctgtgcccgccttccgtcactgaccttccg

SEQ ID NO: 5991 - DNA, 257 bp, Homo sapiens
  misc_feature 1..257: note = U/M: U (0.14:0.93) in Pancreatic Alpha + Beta + Delta cells
  misc_feature 1..257: note = source = chr5:179044384-179044640; Gene: HNRNPH1 (intron)
  source 1..257: mol_type = genomic DNA
cgcatcccccaagaattaatctattactggagaggaaacttctcatatatccttatttttccatttctctattgtaaatgttagtcacacaatcacctgttaagagcccacaaatgctcaatcacacttacgcatatttgctttgtcttttgacatagctgccacagcatcttcatgagttgcgaactcgacatctgcttcaccagttactctgccatcaggaccaatttcaatgtgtactctcacagggttgagcg

SEQ ID NO: 5992 - DNA, 295 bp, Homo sapiens
  misc_feature 1..295: note = U/M: U (0.07:0.86) in Pancreatic Alpha + Beta + Delta cells
  misc_feature 1..295: note = source = chr5:176357690-176357984; Gene: UIMC1 (intron)
  source 1..295: mol_type = genomic DNA
cggccgttagaaaactccttagagatcagtctatgcatggtcaatctccacagctatcaccagaaagaagtaatgttcatctgatctttttttgactttgcactcacaggtttacagaggcaactatgtcacatggacgctgttcaccagcaaagagtctaatccatcaaaccatttattctaggtaattgaaaatctgacaaggtcaattctgatgagatgagaattcatgtttgcactcagaggtaaaagactatagcattctgctttcctgaaaccgactgaggcttccacg

SEQ ID NO: 5993 - DNA, 39 bp, Homo sapiens
  misc_feature 1..39: note = U/M: U (0.18:0.96) in Pancreatic Alpha + Beta + Delta cells
  misc_feature 1..39: note = source = chr4:79747213-79747251; Gene: BMP2K (exon)
  source 1..39: mol_type = genomic DNA
cgtgcgtactcacggtggaatccgatgtgcattgaagcg

SEQ ID NO: 5994 - DNA, 186 bp, Homo sapiens
  misc_feature 1..186: note = U/M: U (0.06:0.84) in Pancreatic Alpha + Beta + Delta cells
  misc_feature 1..186: note = source = chr10:135144559-135144744; Gene: CALY (intron)
  source 1..186: mol_type = genomic DNA
cgttatctgatcaattgctagaggagcagaagtaactctgggtaagactcagggctcatttactattcctcggacccattagtgcattaaggcaggaggcgagtgctgtaacccggtaacagtgaaccactaaatccccacagcaaacctcactgaatgtgaatcctgaaagtgcctcgatctgcg

SEQ ID NO: 5995 - DNA, 220 bp, Homo sapiens
  misc_feature 1..220: note = U/M: U (0.02:0.8) in Pancreatic Alpha + Beta + Delta cells
  misc_feature 1..220: note = source = chr15:39323746-39323965; Gene: C15orf54 (Intergenic)
  source 1..220: mol_type = genomic DNA
cgccatttaaaagaaaaaatggctaaaaaagaatttgcttacagggagacttttctcacttccaataggatttcctagcaacaaacaggggtccttttcccttcatttgtgtgtggttgtgcacgctgtgtttgcagtgatggggagaagtttggggaggcgggggactggaaagggtggctcatcctctctccggaggcagctgctttctccattagcg

SEQ ID NO: 5996 - DNA, 230 bp, Homo sapiens
  misc_feature 1..230: note = U/M: U (0.04:0.82) in Pancreatic Alpha + Beta + Delta cells
  misc_feature 1..230: note = source = chr19:13711081-13711310; Gene: CACNA1A (Intergenic)
  source 1..230: mol_type = genomic DNA
cggcaacatatgtgccccatggagcaaaacactatgaggctgtgccgcgggcactcgctccacctcccaggtgccggccacagagggcgggatgctggatttctcagcatctctatgtctccttctgcaaaatgagccaccatgggcctgggggttggctctccctcagtcccttggtcctgtgagctctggaaagctgaaagggtgagttcaagaggcagttttaaacg

SEQ ID NO: 5997 - DNA, 267 bp, Homo sapiens
  misc_feature 1..267: note = U/M: U (0.02:0.8) in Pancreatic Alpha + Beta + Delta cells
  misc_feature 1..267: note = source = chr19:13710721-13710987; Gene: CACNA1A (Intergenic)
  source 1..267: mol_type = genomic DNA
cgctgggcgtgccccgagctgcggttgtgcagggcgtcatagtaactggggcgcgagagcatggagtcggggacccaggaagacttcaacatccacgggcctcgctcagaaatcccagggtcttctccctccagcacagtgagggggaaactagaagaagaaagaggagacagagagggccagtgtgagggagaggcagacagagctcacagagggcaaggagaagggaactcagaagacaaggagaggccgccccaccctccttcg

SEQ ID NO: 5998 - DNA, 284 bp, Homo sapiens
  misc_feature 1..284: note = U/M: U (0.15:0.93) in Pancreatic Alpha + Beta + Delta cells
  misc_feature 1..284: note = source = chr8:141339511-141339794; Gene: TRAPPC9 (intron)
  source 1..284: mol_type = genomic DNA
cgatggctcgtctcctagggagcacatggcatttcaagcacacacgacaacggtctggaagtcaagtgctgcattagaggctcacctgcattgccttacttaatatttacatttatccagtgagtcaaatattatcattagccccactgtagggaagagaaaagtgaaaatcagagatattataaatcttttcaaaggccacactgctagtaagtgaggctgagattttaaccccaggcttcttgaatctattgctctttctaccatattaagcaacctcctcg

SEQ ID NO: 5999 - DNA, 349 bp, Homo sapiens
  misc_feature 1..349: note = U/M: U (0.14:0.92) in Pancreatic Alpha + Beta + Delta cells
  misc_feature 1..349: note = source = chr1:233140781-233141129; Gene: PCNXL2 (intron)
  source 1..349: mol_type = genomic DNA
cgagagtggaggcttcgaaacatgaataatgaccgctacctgctctcaaaagaaaacatttggaaatgctcacagcatcagataggagctaagtgctaaaatgagagagctaactcctgaaaaatgggtgggatttattcaggaaaggattcggagggtcatgatacttgctcagaatggcctggcatatgcataagagaaaaagctttctccagatgtagagatggggatagtggaaaaggaagattaacacccagacacccagagcaacatccacagacaaaagagaagagccaggaatcgcaggcatcagcctagtgtttgcccagctgcgtgtgcccggcagccg

SEQ ID NO: 6000 - DNA, 385 bp, Homo sapiens
  misc_feature 1..385: note = U/M: U (0.12:0.9) in Pancreatic Alpha + Beta + Delta cells
  misc_feature 1..385: note = source = chr1:9629509-9629893; Gene: SLC25A33 (intron)
  source 1..385: mol_type = genomic DNA
cgctgctcacaggcaatgctcctacagtgtaaccctggtaacctgatgcagattcctgactgcctcacccattaggggaaatggaagacttttaaaacacaacaatgataagtagttaagatcctaaactgcaaaatatattctatgattgattcattgaccagcagaagaaagaaacattttccctgcattgctggtgaaagagcaggaaaaatcccaagtagctcctatttcccagccccaacaagagggaagacagcagggggaaaagtgaagagaaaacaagggtgacgggaccactttgcggtagtcaaggcagggggtggcggaagggccctttatgaaaacacaggtatgatatgatggctgttcctgtgtgttcccg

SEQ ID NO: 6001 - DNA, 422 bp, Homo sapiens
  misc_feature 1..422: note = U/M: U (0.16:0.94) in Pancreatic Alpha + Beta + Delta cells
  misc_feature 1..422: note = source = chr1:90181842-90182263; Gene: LRRC8C (exon)
  source 1..422: mol_type = genomic DNA
cgagggcatcctggaatcaattccccatgataccgagggatgactggatattaatcgatttccctcaagcctgcccttgctgtgaactagtgctacaagcacgggaaatccatctgctctctggcttaaaatatgtatctcatctaaaattgttcgttaaagtgtgaataaattgctaagtggttgttgcttagcaataatttttgcctgaccatcagcagagcttttatttacctttgtaattaaaatccaacatagcatgggctcttgggcaaaatatttcactgactattaagcatgtagaacaggaaaatgaaatacactatttgtgcccttgacctagaaccagaaccactaattatgagaactttgttttatgtaccaaattcacattgaccattttctgagctctagactgatcg

SEQ ID NO: 6002 - DNA, 119 bp, Homo sapiens
  misc_feature 1..119: note = U/M: U (0.1:0.87) in Pancreatic Alpha + Beta + Delta cells
  misc_feature 1..119: note = source = chr3:4482756-4482874; Gene: SUMF1 (intron)
  source 1..119: mol_type = genomic DNA
cgggccaaacagcaggaggtgagtggcaggcgagcaagcaaagcttcatctgtatttacagcccgctcctcgttgtttgcgttaccacctgagctctgcctcctgtcagatcagtagcg

SEQ ID NO: 6003 - DNA, 231 bp, Homo sapiens
  misc_feature 1..231: note = U/M: U (0.18:0.94) in Pancreatic Alpha + Beta + Delta cells
  misc_feature 1..231: note = source = chr10:104281758-104281988; Gene: SUFU (intron)
  source 1..231: mol_type = genomic DNA
cgctgtcccagttgtgcacagggcttttgctttgcgtgcatctcatcttcttagtgaggacttaacatcttctgaggcttccctgctacctgcttaacgctgttgtctgaattcagcttgcccactgttgctagggtttctagattctgaaaacagcacatttgcttgggaagatagctcttacccactgccatgttacattaacgatattcccatttttcctccttgacg

SEQ ID NO: 6004 - DNA, 158 bp, Homo sapiens
  misc_feature 1..158: note = U/M: U (0.19:0.94) in Pancreatic Alpha + Beta + Delta cells
  misc_feature 1..158: note = source = chr7:1877468-1877625; Gene: MAD1L1 (intron)
  source 1..158: mol_type = genomic DNA
cgaagggtcttgccttgatggcctcacgggtgcgtgtatacagatggtagctcatcaataacgcagactcagcaaacagggaagccctggcaggaggaggtggtggcatcgggggcaggtccagctgtcacaggccagcctggtgaaacacggcagcg

SEQ ID NO: 6005 - DNA, 101 bp, Homo sapiens
  misc_feature 1..101: note = U/M: U (0.03:0.77) in Pancreatic Alpha + Beta + Delta cells
  misc_feature 1..101: note = source = chr7:4175336-4175436; Gene: SDK1 (intron)
  source 1..101: mol_type = genomic DNA
cgtgcctccctcactggttagagttgcacttagaacagtgcctgccacatagtgagtgctgagtaaacgttagcttccgtatcagatcgaatatttcatcg

SEQ ID NO: 6006 - DNA, 237 bp, Homo sapiens
  misc_feature 1..237: note = U/M: U (0.15:0.89) in Pancreatic Alpha + Beta + Delta cells
  misc_feature 1..237: note = source = chr3:73187876-73188112; Gene: EBLN2 (Intergenic)
  source 1..237: mol_type = genomic DNA
cgaactgctgggagctgccctcgatgccctaacccacagaaggccacggctctgtcattttcttcccgacttgttctgctttctgctttaatgaccagtgctaccttttgggccagcttgttcctaatgccgcctgtaattgagactcaaatagtaaaatacacataaccggccattttaccaagtcatcatttatgaatatagctcgattaatttgtttagtcagatgtagaggcg

SEQ ID NO: 6007 - DNA, 239 bp, Homo sapiens
  misc_feature 1..239: note = U/M: U (0.21:0.94) in Pancreatic Alpha + Beta + Delta cells
  misc_feature 1..239: note = source = chr9:5655518-5655756; Gene: KIAA1432 (intron)
  source 1..239: mol_type = genomic DNA
cgcaaactcctgacctcaggtgatctgccaacctcagcctcccaaagtgctgggattacaggcatgagccgtggcgcccggccttgctcagcgtttttatcttggttgttagatttgttaagtgctttttctgtgtttattgaaataatcatgtgatttttctgtagcctgttgatgtgatggattatattaattgagttttgaatgccgaaccaggcttgtatttctggggtatatcg

SEQ ID NO: 6008 - DNA, 261 bp, Homo sapiens
  misc_feature 1..261: note = U/M: U (0.24:0.95) in Pancreatic Alpha + Beta + Delta cells
  misc_feature 1..261: note = source = chr3:169880832-169881092; Gene: PHC3 (intron)
  source 1..261: mol_type = genomic DNA
cgtacttgtttaatgttcgtctatccctagctccatgaggaaagagatttgtttgttgtggtactgtatcctcagcacctagaagaggatttggcgaatattaaacgctcgataaatatttgatgactgaatgagtgaatgcatgaatgaacaaagtcataaaactgggcttcaaaagctcatcttgtctagcatcataactagaaagtcataaaaaaaaaaaagttttttccctttctgacagaatagtacagtgagtcg

SEQ ID NO: 6009 - DNA, 128 bp, Homo sapiens
  misc_feature 1..128: note = U/M: U (0.23:0.93) in Pancreatic Alpha + Beta + Delta cells
  misc_feature 1..128: note = source = chr4:156609240-156609367; Gene: GUCY1A3 (intron)
  source 1..128: mol_type = genomic DNA
cgtggtggcgggcgcctgtagtcccagctgctcgggaggctgaggcaggagaatggcgtgaacccgggaggtggagcttgcagtgagccgagatcgcaccactgcactccagcctgggcgacagagcg

SEQ ID NO: 6010 - DNA, 245 bp, Homo sapiens
  misc_feature 1..245: note = U/M: U (0.14:0.83) in Pancreatic Alpha + Beta + Delta cells
  misc_feature 1..245: note = source = chr2:73534707-73534951; Gene: EGR4 (Intergenic)
  source 1..245: mol_type = genomic DNA
cgaggggacaatctgggttgattcgctttcccagacagtgcttttgcactgactcctttgacccttttgtccctctcttttcactgggttgctatcatttctgccaccagagccttgttgttgaggccaaaacccccaccaccatggaagacccagatgtcctacaggcctctttggaaaacactgtaagcagaattcacccagctgttgggcgccagcagcaagttctccaaagcagctccgcg

SEQ ID NO: 6011 - DNA, 254 bp, Homo sapiens
  misc_feature 1..254: note = U/M: U (0.26:0.92) in Pancreatic Alpha + Beta + Delta cells
  misc_feature 1..254: note = source = chr4:24545070-24545323; Gene: DHX15 (intron)
  source 1..254: mol_type = genomic DNA
cgttatttatatcaccaaaattcaactcaacattttaaacaaaatgccacatggaaaaaaactcaagttataatccagtaagaatggacagatcagcagaatcaaatgtaaatatttcggtaagtgcatggtctcaacgggatgacatgtaatacgttactacatacaaagcaactgttaagaactataattctttattgacggaaaatgtttaaagcatttacatactaatatgatagcttgtttggtatacg

SEQ ID NO: 6012 - DNA, 196 bp, Homo sapiens
  misc_feature 1..196: note = U/M: U (0.01:0.91) in Pancreatic Alpha + Beta + Delta cells
  misc_feature 1..196: note = source = chr6:151609952-151610147; Gene: AKAP12 (intron)
  source 1..196: mol_type = genomic DNA
cgaggcctggtctgtgttccgctgtattgctgatgaagctaaaaattaagggattaatggcatcgctagatgcgccctgtagcggctggcagctctaaaagctcttctgacagctataacttatgatttataaatgaggttaatggattcctgttagaatggaaaatgcacttgtgtaagatcacttattcaagcc

SEQ ID NO: 6013 - DNA, 205 bp, Homo sapiens
  misc_feature 1..205: note = U/M: U (0.02:0.88) in Pancreatic Alpha + Beta + Delta cells
  misc_feature 1..205: note = source = chr7:38479445-38479649; Gene: AMPH (intron)
  source 1..205: mol_type = genomic DNA
cggacctcttccagtgcagatgtgcaatttgagcataatcggcatgcctagccttgccacggcttcgtgatagatggattttacttccccatcccttacgtggggttgaccatatgtcatgctttagctaatggatattagttaatgtaatgcaaacaaaggctggaaatgtgcttgcatgtttggttggttggtttgtattccg

SEQ ID NO: 6014 - DNA, 412 bp, Homo sapiens
  misc_feature 1..412: note = U/M: U (0.08:0.85) in Pancreatic Alpha + Beta + Delta cells
  misc_feature 1..412: note = source = chr7:37149874-37150285; Gene: ELMO1 (intron)
  source 1..412: mol_type = genomic DNA
cgaagaggcccagctgcctggctgtatttgtatctgcacaggtgcccagggaacaccagcctcactctcagcttcatctccaggtcccctacctctgcccagaggtcctcacatctgcacctgactggagctaatgacaaacatccttacacagcaacttttacgctgatttgcaaaatgatttattttaagtacgtttctaaaaacataaacgttaagtcaaaaggtctcagcatttctgccacttaaagtatacctatgtaacaaacctgcatgttctgcacatgtatcccagaacttaaagtataatttaaatatatatatataagtattgataaaccataatctaaaaatgatgtcatttcacacttcccaaagcaatggaggagttccctttaaaatcatttcaccg

SEQ ID NO: 6015 - DNA, 263 bp, Homo sapiens
  misc_feature 1..263: note = U/M: U (0.02:0.96) in Pancreatic Alpha + Beta + Delta cells
  misc_feature 1..263: note = source = chr18:77076138-77076400; Gene: ATP9B (intron)
  source 1..263: mol_type = genomic DNA
cggacacaatcgctttgaaagagaaaatcaagtgatgacatcggaaacaggattattagagagctcctgactgagtaaagaaaaatctaaatgacaaatggccggtcgtgcaggtggagattgcgttctgtggttgcctgcgccatccctgagagcatccagagaaaacagggaaaaatgtccactgcaaccttccacccgccgcctgaatgtgagggctgcagccacgtgtcacctgctgctgtggagacagaatctgagcc

SEQ ID NO: 6016 - DNA, 116 bp, Homo sapiens
  misc_feature 1..116: note = U/M: U (0.02:0.93) in Pancreatic Alpha + Beta + Delta cells
  misc_feature 1..116: note = source = chr4:184205408-184205523; Gene: WWC2 (exon)
  source 1..116: mol_type = genomic DNA
cgctaatgacaatatggcagttcgccccaaagagcgcagcagcctgagctctagacagcatccgtttgtgaggagcagtgtgatagtgcgctcacagaccttttctccaggagagc

SEQ ID NO: 6017 - DNA, 137 bp, Homo sapiens
  misc_feature 1..137: note = U/M: U (0.02:0.93) in Pancreatic Alpha + Beta + Delta cells
  misc_feature 1..137: note = source = chr14:102467285-102467421; Gene: DYNC1H1 (exon)
  source 1..137: mol_type = genomic DNA
cgacagcttcgacaaaatttggatgccctcctgaaccagctgaaaagcttccctgcccggttgcgacagtatgcgtcctatgagtttgttcagaggcttctgaaaggttacatgaaggtaggtggccagtatcgcac

SEQ ID NO: 6018 - DNA, 151 bp, Homo sapiens
  misc_feature 1..151: note = U/M: U (0.03:0.94) in Pancreatic Alpha + Beta + Delta cells
  misc_feature 1..151: note = source = chr6:35196350-35196500; Gene: SCUBE3 (exon)
  source 1..151: mol_type = genomic DNA
cgcaggtgggttcagctgtctcagcttccctttgcccacagacgtggatgagtgcgagcgagaggataatgcaggttgtgtgcatgactgtgtcaacatccctggcaattaccggtgtacctgctatgatggattccacctggcacatgac

SEQ ID NO: 6019 - DNA, 82 bp, Homo sapiens
  misc_feature 1..82: note = U/M: U (0.02:0.92) in Pancreatic Alpha + Beta + Delta cells
  misc_feature 1..82: note = source = chr19:5080780-5080861; Gene: KDM4B (intron)
  source 1..82: mol_type = genomic DNA
cgagagccccaaactggaaacagcccgcacgtccatcaacaggaggatagataaataaataaccatagatccacgcgcaacc

SEQ ID NO: 6020 - DNA, 156 bp, Homo sapiens
  misc_feature 1..156: note = U/M: U (0.05:0.94) in Pancreatic Alpha + Beta + Delta cells
  misc_feature 1..156: note = source = chr2:3425344-3425499; Gene: TRAPPC12 (intron)
  source 1..156: mol_type = genomic DNA
cggagctttccaataaaaagcctcttcccgatgttctatcggttgttgaattgtaatgtttttatgatttgatcggcttgaactgtacctcacgcttggctctcttattgcctaattacacgtgcagcgttgacaaatggcatgcccctccgtgcc

SEQ ID NO: 6021 - DNA, 471 bp, Homo sapiens
  misc_feature 1..471: note = U/M: U (0.06:0.95) in Pancreatic Alpha + Beta + Delta cells
  misc_feature 1..471: note = source = chr17:29669584-29670054; Gene: NF1 (intron)
  source 1..471: mol_type = genomic DNA
cgacagagtaagactccatctcaaaaaaagaatatttgcaaatggagcattgcaaatggggcatctgcctcggtattttcatcttcaaaacagcccagtagcgggagctaatattgattctagtgccctttggatgctaggcatcagagttaataagcatgttaaaagtcaccgggatgtaaattgacagtcatttattttgtattgtaaataaaagtgatttcatcttccaccatcttcttatttatatgcttgactgtcttgcaccagttaatttgtagtagctaaaatgttctgtggttttctgcagtcaactgaaaataatttctctcaaattgaaaggattacttatcttgtcatactattgaacacaaaattaagtgagcctttaaagaaagctactgtgtgaacctcatcaaccatctcatgattatctttaatagagtccagaggaagtatttatggcaatcc

SEQ ID NO: 6022 - DNA, 174 bp, Homo sapiens
  misc_feature 1..174: note = U/M: U (0.07:0.92) in Pancreatic Alpha + Beta + Delta cells
  misc_feature 1..174: note = source = chr19:50424333-50424506; Gene: NUP62 (intron)
  source 1..174: mol_type = genomic DNA
cggacatctccacacccacatttcatggcatttctcacgcgctgggctgtttccagggcttcacctgttctcactcacttaactttcccccagcaatgtgacgaagcgaaactatcatggctcccatttataaatgagcaaactgagaaaggggagaggacttcagtcacctgc

SEQ ID NO: 6023 - DNA, 360 bp, Homo sapiens
  misc_feature 1..360: note = U/M: U (0.09:0.94) in Pancreatic Alpha + Beta + Delta cells
  misc_feature 1..360: note = source = chr1:110560854-110561213; Gene: AHCYL1 (exon)
  source 1..360: mol_type = genomic DNA
cggttatgcatgtcttctctcagaatgtctacatgttctttaatgccagcaagcctctggtctcctatgttctacctgaaagccagccagtacctttgttgcccggcatctctttccttaaccacccatcttttcttttaggaaataagaatgtagtgacacgggagcacttggatcgcatgaaaaacagttgtatcgtatgcaatatgggccactccaacacagaaatcgatgtggtaaggcttctctcatttgttgctaggcatttctctactacctttcattaataaccatagtcaactgtgctttcttcctttcagaccagcctccgcactccggagctgacgtgggagcgagtac

SEQ ID NO: 6024 - DNA, 224 bp, Homo sapiens
  misc_feature 1..224: note = U/M: U (0.11:0.92) in Pancreatic Alpha + Beta + Delta cells
  misc_feature 1..224: note = source = chr6:7565596-7565819; Gene: DSP (exon)
  source 1..224: mol_type = genomic DNA
cgtcctttgagaggatggatcacctgcgacagctgcagaacatcattcaggccacgtccagggagatcatgtggatcaatgactgcgaggaggaggagctgctgtacgactggagcgacaagaacaccaacatcgctcagaaacaggaggccttctccgtaagttcaccccacgcggctgtagatgcttgtcttgagcctgttgccttgaagagctggggtctc

SEQ ID NO: 6025 - DNA, 229 bp, Homo sapiens
  misc_feature 1..229: note = U/M: U (0.12:0.92) in Pancreatic Alpha + Beta + Delta cells
  misc_feature 1..229: note = source = chr6:26863547-26863775; Gene: GUSBP2 (intron)
  source 1..229: mol_type = genomic DNA
cgcgggtacctggctgcgcttattaatccattatggtcgctctgtcactggtgccattatgtgctcacgcgcccactccctcaggtttagaaggtgcgttgcccggcaacagaagaatctgctggcttagcctttggccgagttggcagctggacgaggacgctcagagcccagctctcgagagttcaagcatccgacggttccccactgctcccaggagcggttaccc

SEQ ID NO: 6026 - DNA, 496 bp, Homo sapiens
  misc_feature 1..496: note = U/M: U (0.09:0.89) in Pancreatic Alpha + Beta + Delta cells
  misc_feature 1..496: note = source = chr14:77171592-77172087; Gene: VASH1 (Intergenic)
  source 1..496: mol_type = genomic DNA
cgcccggcctcaaaatgcaaatctgatcgtgtacctcttcttgcctcccacccttctaggatgcaggttatacaacgctgtgaactggccccttcctgaccctccagcttcatctcatccgctctccctccctctcagaagaactaactggtcctctttcgttccctggatacaccctgctcctgctgtctcagcactatgcacctgcttttatttctgcctggaacacccaaccatatgtggatgggtacacacacacacacatcttccctgctaactcacatggatcaccagtgtcactgactccctagatgtatatgacatagtcatgtatcacttgatgtgtatgacatagtcatgtatcacttgatgtgtatatgacatagtcatgtatcacttcatgttctgagaaatacgttaagcaattttgtcatcgtgtgagcatcatggagtgcacttacacaaacctagtgcctacaacacacctcggctatac

SEQ ID NO: 6027 - DNA, 475 bp, Homo sapiens
  misc_feature 1..475: note = U/M: U (0.03:0.93) in Pancreatic Alpha + Beta + Delta cells
  misc_feature 1..475: note = source = chr18:43450431-43450905; Gene: EPG5 (intron)
  source 1..475: mol_type = genomic DNA
cgctagcacacactgccactatgcctaacaaccacagtgaccaggctgctccctagaagccagatctctctaggctgcgatgccgggaatgaagggcttactttgaagaaggcctccatgagcatctggtcagggtgcaggtccttccatggcagtttccggtacgtgctatggaaagcgtacagaatgaactctggcattttgggtgctgtacatgcttcacaataatgcatcaggtgcaaccaaagggctcctgcatcacctggcaacagcttatctagaatgtgaaaagaaaatagagctgaagacctttggtttaccttaaaaaaaaaaaaaaaaagcaaatttgaactaaaagtctaaaatctaaggttctcatgattgacccaatttcaaagattttcatgtagggagagtggttaaggggactactggcagattagtaataaagaatggtactttaattacccactcg

SEQ ID NO: 6028 - DNA, 336 bp, Homo sapiens
  misc_feature 1..336: note = U/M: U (0.04:0.93) in Pancreatic Alpha + Beta + Delta cells
  misc_feature 1..336: note = source = chr19:14092942-14093277; Gene: RFX1 (intron)
  source 1..336: mol_type = genomic DNA
cgagtgcacctgctgggtaccatggaccgtcagggagacctggccacctttgctgcctggggctgcgctctgcaccaccagacgctgcgtgggaagagcctggggccagggagggagagggagggcagatcactgatgacagcccgtgcagttgcaccgagcatctgcgcagtgccaggtgacattctaagtgcttcacgcctgttagctcacagaatcgccctgacagccctgatgaagctcggctactgcccccacttcacagagggtgacaccaaggctcaggacggcaaaggcacttatctgaggtcctaaagccaggaagcggcagagccg

SEQ ID NO: 6029 - DNA, 116 bp, Homo sapiens
  misc_feature 1..116: note = U/M: U (0.06:0.94) in Pancreatic Alpha + Beta + Delta cells
  misc_feature 1..116: note = source = chr14:66533815-66533930; Gene: LINC00238 (Intergenic)
  source 1..116: mol_type = genomic DNA
cgttgcttttcagcgtagggacctcagtgcggcagcagcatcctcatcaccagggagctggttaataaagcggaaactccagctgcactccaacctcctccatcagagcctgtgcg

SEQ ID NO: 6030 - DNA, 216 bp, Homo sapiens
  misc_feature 1..216: note = U/M: U (0.06:0.94) in Pancreatic Alpha + Beta + Delta cells
  misc_feature 1..216: note = source = chr20:48446527-48446742; Gene: SLC9A8 (intron)
  source 1..216: mol_type = genomic DNA
cggtaccttgaagtggatgatggccggaccagtggctgcatttaaatggcagccgaccagaagcgagcctgttaaagatgcagatcctcatttccatcatttcctgctaagccaaacaagccatctctgtctgttaccaggcaatcacaaagaagttgaaaatatgtgaagaggaaactggttccacctccatccgggcagctgacagcacggccg

SEQ ID NO: 6031 - DNA, 280 bp, Homo sapiens
  misc_feature 1..280: note = U/M: U (0.02:0.9) in Pancreatic Alpha + Beta + Delta cells
  misc_feature 1..280: note = source = chr10:77358893-77359172; Gene: C10orf11 (Intergenic)
  source 1..280: mol_type = genomic DNA
cggctggcgttcacggcctctgagcctctgagctaaaaagtctgcagagagtctcctggcgctacagagtttgtcttgtaaaagtgcagctgtccaaaacatgacagctacagcattagcagggccattaagaggtgtagaacatttccagggaaatgatttgaaaaatgacaatgctggctcctgtgtgatattaattataccctgtactcatggcaaataagctaaaatcgctggcaagaaagactaagtgaggtgtcctggttctgaccgtcattcg

SEQ ID NO: 6032 - DNA, 380 bp, Homo sapiens
  misc_feature 1..380: note = U/M: U (0.05:0.93) in Pancreatic Alpha + Beta + Delta cells
  misc_feature 1..380: note = source = chr9:97939019-97939398; Gene: FANCC (intron)
  source 1..380: mol_type = genomic DNA
cgcaaggcgctacaaacctggttgagatggaaagtaatgtagtatgtaattgaaggaaaccagttttgagcagtaacagctaagggtcagttaagattgtagatgttaaacaaaaccatgcccaggctttcccctaacccacagcctcccagaagcactcacaccctgggcctgggaccagctcacggagggtgacttcccaatactgtatgagctccgtcttgacatttgatagattcagagggtgagatgagagattgtaaataattcttaagtaatgtttaaaatagccacaaatagttccctagatattacagtcatgtatcacttagcaactgggatacattctgagaaatgcttcgttaggcagtttctttgcg

SEQ ID NO: 6033 - DNA, 113 bp, Homo sapiens
  misc_feature 1..113: note = U/M: U (0.04:0.91) in Pancreatic Alpha + Beta + Delta cells
  misc_feature 1..113: note = source = chr20:5819299-5819411; Gene: C20orf196 (intron)
  source 1..113: mol_type = genomic DNA
cgggaggctgaggcaggagaattgtttgagtctgtgaggtggacgttgcagcgaggcagaggttgcagtgagctgagacggcgccactgcactccagcctgggtgacggagcg

SEQ ID NO: 6034 - DNA, 299 bp, Homo sapiens
  misc_feature 1..299: note = U/M: U (0.09:0.94) in Pancreatic Alpha + Beta + Delta cells
  misc_feature 1..299: note = source = chr11:36297713-36298011; Gene: COMMD9 (intron)
  source 1..299: mol_type = genomic DNA
cggccatgcggctgatgctgtctgaggaggttttgatatccactctccagtccagatcgaccaggcgtggcagagagactgtggaaggaacagctcagctcaatgctcatgccgcccgtgtttaccaagcatttattgtacgacaggcggctctgaggactgcacacatgcaatgcattggtctatgcagcaagtctctgagaaagacagataaacaaagcccgagacccacagcgagtcatgtgccttacccattgctctgtgctgcctgcacttggtactaattcacagtggcagcg

SEQ ID NO: 6035 - DNA, 410 bp, Homo sapiens
  misc_feature 1..410: note = U/M: U (0.03:0.88) in Pancreatic Alpha + Beta + Delta cells
  misc_feature 1..410: note = source = chr15:99340557-99340966; Gene: IGF1R (intron)
  source 1..410: mol_type = genomic DNA
cgaaagcccactcagggggaaggtaaacctgatgcccgggtgtttggacagtgagcatggcgagtggaccgttacctgtgcatagagttgttcatatgtggtgacagatgttgggctgttatttagtaacttcaaattgtttttctttgcgtcggagccatgtctaggttctgagtgcttctcccaggtcagatggagagctcttcatttggggttgggggagcggggtggtgttttcaggtgcccaaggcattccatgcacatgcacctgcagggtatgtgtcatctggggtaagacagagccctcccggttcctcttctggatgtgtgcttttagtttttaaagaatgtcagtatatacattgccatttattcaacaaatacggactgagcattctgttgtgctgacg

SEQ ID NO: 6036 - DNA, 115 bp, Homo sapiens
  misc_feature 1..115: note = U/M: U (0.07:0.91) in Pancreatic Alpha + Beta + Delta cells
  misc_feature 1..115: note = source = chr4:7035875-7035989; Gene: LOC100129931 (intron)
  source 1..115: mol_type = genomic DNA
cgggaggcggaagttggagatcgcaccactccactctagcctggcaacagagcgatactcagtctcaaaaaaaaaaaaaaaatatgagacgcagggaaggatgtgcgtagacgcg

SEQ ID NO: 6037 - DNA, 190 bp, Homo sapiens
  misc_feature 1..190: note = U/M: U (0.01:0.85) in Pancreatic Alpha + Beta + Delta cells
  misc_feature 1..190: note = source = chr14:49515982-49516171; Gene: RPS29 (Intergenic)
  source 1..190: mol_type = genomic DNA
cgtatcaagctctgggtgtgagacaacgcacaagggagtcaccacggaactaatgaaatgaataagtaaacaaccactgcaatatagtatccagacaactgagtggtgactgtagtgaatgtagagtatcaaacaagatgacacaacactgtacctctgtgaagtcaggagaggtgccacggaggaaacg

SEQ ID NO: 6038 - DNA, 198 bp, Homo sapiens
  misc_feature 1..198: note = U/M: U (0.05:0.89) in Pancreatic Alpha + Beta + Delta cells
  misc_feature 1..198: note = source = chr2:53743530-53743727; Gene: CHAC2 (Intergenic)
  source 1..198: mol_type = genomic DNA
cgtctcccagattgtgcatctagaagaacctggagcaggtgaaagaaaattaggcaatagacctaatgacaagtcggtgggcgtagagaaaattaattgaacttttctgcctttctcgactcctattctccgatgttcagggcagccagttattacggggacctcagaagatatttaccggcctctggtgctgccacg

SEQ ID NO: 6039 - DNA, 450 bp, Homo sapiens
  misc_feature 1..450: note = U/M: U (0.06:0.89) in Pancreatic Alpha + Beta + Delta cells
  misc_feature 1..450: note = source = chr6:15358643-15359092; Gene: JARID2 (intron)
  source 1..450: mol_type = genomic DNA
cgatactggtactaacacactgtttttgtgttgttggtggattaggactgaattacctctgactcagagattcagggttaatgagattttcatcattgagttggggcaaccgaagctttgaatggatgatagcagattgattctgtttcttgaagccagtaggtgctcgttttatgtttcagtgaatgaaaacttgtgtccactgtaacctttttgctttttctgagaatagtgaattctcattttcagagaattactgtcaagaaaaacatgtatcaagccattccgtgtgctctgtttaaacagttacctggtttccttagttacaaaggtttcccttctttctctctacagttagttactaagcttttaacgcgtaccagtcttgatgttaaggagttgtcagaatatagattttttcatgccaggaggctgatttgggagatggcg

SEQ ID NO: 6040 - DNA, 490 bp, Homo sapiens
  misc_feature 1..490: note = U/M: U (0.04:0.86) in Pancreatic Alpha + Beta + Delta cells
  misc_feature 1..490: note = source = chr12:114318713-114319202; Gene: RBM19 (intron)
  source 1..490: mol_type = genomic DNA
cgtagacagaaagaggctctctctgccttgcccccttcctaaaaacactgctgtcatcaaatgtcccttagtctgcaaacgcgggtgagttttgggctgtgaacatcagtacccacatcacatcctgaacaccatcatcccctcaatttgcttccttacacacgcaaggcttgcctgaactggggcgctgctctaatgggtctgaggaggcaggagggagttctggaacacgcactgtcttggattccccacccagccccgataatggcttttctcgagcgagtttctcggtagctgcagctgcagaagcacagacaggtacagttgccatgatacggccgttgtggtaatttagcctcagagctctggctcccctggaataatttaacgatctgtcgtgggaagggaggaaggaggacaagtgtggtgtggcttggtgtctccacctccaaaaaataatctaagtttccgtagccagaggaggcccacg

SEQ ID NO: 6041 - DNA, 189 bp, Homo sapiens
  misc_feature 1..189: note = U/M: U (0.08:0.89) in Pancreatic Alpha + Beta + Delta cells
  misc_feature 1..189: note = source = chr14:69160412-69160600; Gene: ZFP36L1 (Intergenic)
  source 1..189: mol_type = genomic DNA
cgggaacaagagcaagtcaaagactgtgttctagcactcgtccgcctgctgaacctcatcacgagcttctttgctgcatgtgctcagattctgtctctgtttaccctttccacctggggaagcacggagctcattgactcttccgcaggagcccttgctgaagaaatcatttgtcattctatctatccg

SEQ ID NO: 6042 - DNA, 312 bp, Homo sapiens
  misc_feature 1..312: note = U/M: U (0.11:0.92) in Pancreatic Alpha + Beta + Delta cells
  misc_feature 1..312: note = source = chr6:7463279-7463590; Gene: RIOK1 (Intergenic)
  source 1..312: mol_type = genomic DNA
cgacatggatgaaccttgaggaaattatgcttagtgaaaaaggccagacacaaaaggacaaatattgtcattccacttagatcaggtccttacagtagtcaaactcatagagacagaaagtagaatgatggttgccaggggactggggaggagagaaaggggagttagtgtttaatggggacagtttccgcttgtgaagaagaaaaaattcgggagatgggtggtagtgttggttgcacaaaattgtgaatgtacataatgccgctgaactgtgcagttaaaaatagttaaggccgggtgcggtggctcacg

SEQ ID NO: 6043 - DNA, 330 bp, Homo sapiens
  misc_feature 1..330: note = U/M: U (0.07:0.88) in Pancreatic Alpha + Beta + Delta cells
  misc_feature 1..330: note = source = chr14:57896917-57897246; Gene: NAA30 (Intergenic)
  source 1..330: mol_type = genomic DNA
cggctacgctaagtgctttcacagagtactgcattcgatcgtaataaatcacctggtggataggtgcctttatcatcaatcccacagatgaggaaaggggagggtggagcaagatggcagaagagaaggctccacagattgtcccccaccccctctgcaaggacaccaatttaacaactacatacacacacacacacacacacacacacacacacacacacacaacacctttatcagaatcaaaaatcaggtgaccactcagtacctggttttggtttgtatcacagtatgaggcactgaagaggtggaaaaaacagccttgaatcaccg

SEQ ID NO: 6044 - DNA, 118 bp, Homo sapiens
  misc_feature 1..118: note = U/M: U (0.02:0.81) in Pancreatic Alpha + Beta + Delta cells
  misc_feature 1..118: note = source = chr7:5316237-5316354; Gene: SLC29A4 (Intergenic)
  source 1..118: mol_type = genomic DNA
cgaatgagaggagctgacgtctatgaaagccactccctgcacccggggagactgaggaggtgggaggctctcgtcccccgaaagcccagccggccagccccctctccctctgcctccg

SEQ ID NO: 6045 - DNA, 344 bp, Homo sapiens
  misc_feature 1..344: note = U/M: U (0.08:0.87) in Pancreatic Alpha + Beta + Delta cells
  misc_feature 1..344: note = source = chr9:16527607-16527950; Gene: BNC2 (intron)
  source 1..344: mol_type = genomic DNA
cgacaactgataggtcaaatcactagggagcggctaaagagttattaatggtgacaggtacactacctgggagacaggttgagaggcaaaaaagattatttataagcgaatagttaacagctgtacctactgctaagcattacacggatgccacaaactgtagaattcaaatcctgagttattcaagcacgaacaactgcctgtcacccaaatgcaacgcatcgctacaaattaaggtgggagagatgagatgctgcaacgctgcctcacccaggaaggcaatgtcatcctggagctcaggtaagaggtggaaaaaggatgagataaccatgaggtaaattacg

SEQ ID NO: 6046 - DNA, 406 bp, Homo sapiens
  misc_feature 1..406: note = U/M: U (0.11:0.9) in Pancreatic Alpha + Beta + Delta cells
  misc_feature 1..406: note = source = chr14:56759745-56760150; Gene: PELI2 (intron)
  source 1..406: mol_type = genomic DNA
cgtagctatggtcaggctctagcaggtgcattacattaattgtctttccagtgttgcttaaaataacccgtgaagtcagtgttgttattgtgtccgtctacagatgaggaaacctgggctttaaaaggttaagtcacttgctaataagaagtggtggatggggggttgaattcactaccctgtgcttagatagttgctatgtaggggccattagttgccatggtagaggccaaatgtctcttgcttccacaatactgtcaattcctgtgcctgctcatagcttttcttttgtggtagaatttaaaaaataaaatctgaattcatgcctactaatgattgctaaatcaggccaccaggttcaagtcctggtttcaccacttagttctgtggtattgaattgacgacg

SEQ ID NO: 6047 - DNA, 181 bp, Homo sapiens
  misc_feature 1..181: note = U/M: U (0.21:0.95) in Pancreatic Alpha + Beta + Delta cells
  misc_feature 1..181: note = source = chr19:50423947-50424127; Gene: NUP62 (intron)
  source 1..181: mol_type = genomic DNA
cggtaatgctggttgagaacaggctggggaagagcctagagctgaaacgctctggttggcggtgcaggcacaggacatcaaggcctggagagggactgaggcatcagggctgagggactctgagagcagcggacaggcgtgtgtggcgggggaggaacggcgcacacctgtgccccatccg

SEQ ID NO: 6048 - DNA, 481 bp, Homo sapiens
  misc_feature 1..481: note = U/M: U (0.19:0.91) in Pancreatic Alpha + Beta + Delta cells
  misc_feature 1..481: note = source = chr6:43749236-43749716; Gene: VEGFA (intron)
  source 1..481: mol_type = genomic DNA
cgggcttagcctcccatcacaccctactttagcccaccttggtggaagggcctggacatgagccttgcacggggagaaggtggcccctgattgccatccccagcaggtgaagagtcaaggcgtgctccgatgggggcaacagcagttgggtccctgtggcctgagactcacccttgtctcccagagacacagcattgccccttatggcagcctctccctgcactctctgcccgtctgtgcccgcctcttcctgcggcaggtgtcctagccagtgctgcctctttccgccgctctctctgtcttttgctgtagcgctcggatccttccagggcctgggggctgaccggctgggtgggggtgcagctgcggacatgttagggggtgttgcatggtgattttttttctctctctctgctgatgctctagcttagatgtctttccttttgcctttttgcagtccctgtgggccttgctcagagcg

SEQ ID NO: 6049 - DNA, 235 bp, Homo sapiens
  misc_feature 1..235: note = U/M: U (0.2:0.9) in Pancreatic Alpha + Beta + Delta cells
  misc_feature 1..235: note = source = chr11:68210149-68210383; Gene: LRP5 (intron)
  source 1..235: mol_type = genomic DNA
cggaggctcccagctgccgtgtgcaccctgcctagagctctaccgtaacccatctccgggaggaggtgctattgttttcctcattttgcaacaaggaggctgaagaactgagcatgaaccactggcctgggtcgttcggttggtaggcagtggggccaggccatccaactcacaaccaccttctactctgcttcccccgcaccctgaagtttgttctgttttgaggacacagccg

SEQ ID NO: 6050 - DNA, 382 bp, Homo sapiens
  misc_feature 1..382: note = U/M: U (0.32:0.96) in Pancreatic Alpha + Beta + Delta cells
  misc_feature 1..382: note = source = chr12:132504671-132505052; Gene: EP400,EP400 (exon,intron)
  source 1..382: mol_type = genomic DNA
cggcagcccccaccacggcctctgctgctccacagggcccgcttcgaggacggccgcccatcgccacgttctctgccaatccggaggcaaaaggtagacttcacgtagttgtctgctctccgccttatggaggtttttgtgggacaagttcatggcactttcttctcgcgcctctggatgcggtaattgtccctgagtgggaacaggcaccacccgctggctttctgaaggtgccttgtttagttcttgatgagttttagactttttgatggcttgtaatggatgttttccctattgaagaagcttcactcctaggtgataagtgttgatctgatgctcacagccactgggcaggctgtttctgttgacagaggtgcgtgcg

SEQ ID NO: 6051 - DNA, 102 bp, Homo sapiens
  misc_feature 1..102: note = U/M: M (0.89:0.09) in Pancreatic Alpha + Beta + Delta cells
  misc_feature 1..102: note = source = chr1:156384430-156384531; Gene: C1orf61 (exon)
  source 1..102: mol_type = genomic DNA
cggccatttcactcaccgcccgggagctgtccgtggtgctggatgtggctctatcgtccacacggaggaaggagggtgggagggtggtgcagaacccacccg

SEQ ID NO: 6052 - DNA, 172 bp, Homo sapiens
  misc_feature 1..172: note = U/M: M (0.98:0.19) in Pancreatic Alpha + Beta + Delta cells
  misc_feature 1..172: note = source = chr17:27331275-27331446; Gene: SEZ6 (intron)
  source 1..172: mol_type = genomic DNA
cgccccaggggagctgtccagcgccaggacccatcaggacccaagataggttcggaattcctagggacatccccaggcagctaggcagggattcacacttctccttcccggtcttcatccctggggtgggtcttgcaggactcttcccctctccccagaacgtgagcacacg

SEQ ID NO: 6053 - DNA, 278 bp, Homo sapiens
  misc_feature 1..278: note = U/M: M (0.89:0.12) in Pancreatic Alpha + Beta + Delta cells
  misc_feature 1..278: note = source = chr7:156816066-156816343; Gene: LOC645249 (Intergenic)
  source 1..278: mol_type = genomic DNA
cgatgtcctgcttgtggccctggtttgtcattttattaaccattaccttgtacacagagataatttgcatcctgtagacaggatgaagtttgcacatttctgatgagaactctggccacactaccagctcagcccgtttccgtgtcattcaggagttggctccaaccacctgtctacttggagcaccttcccaggcagcttacagtcgggcatcaggacacagtcgcaaaatacgcaaactaatggcatccgaaggcaggagatggctgggacaaacg

SEQ ID NO: 6054 - DNA, 138 bp, Homo sapiens
  misc_feature 1..138: note = U/M: M (0.87:0.12) in Pancreatic Alpha + Beta + Delta cells
  misc_feature 1..138: note = source = chr14:93369148-93369285; Gene: CHGA (Intergenic)
  source 1..138: mol_type = genomic DNA
cgaggacaaaccaccagggacacagctgatgtcagcgtggggctgaggggacatggctcagagcaacagcgtttactacagatgccaagggagaagcaacgcctgtacgaagccacgtggaaacccgacccaaacccg

SEQ ID NO: 6055 - DNA, 188 bp, Homo sapiens
  misc_feature 1..188: note = U/M: M (0.91:0.17) in Pancreatic Alpha + Beta + Delta cells
  misc_feature 1..188: note = source = chr17:48642299-48642486; Gene: CACNA1G (intron)
  source 1..188: mol_type = genomic DNA
cgctctgctccaccgctctgctgggggactccccatcacccgtagtgccagttggagccattcctgggattacccccaccacacagccccccccaccctcgcctgctcccgcccagcactcaccccgccctgcctgcctcagccaggatggcgacagacacaactgctcacacgcagacatgcgcacg

SEQ ID NO: 6056 - DNA, 206 bp, Homo sapiens
  misc_feature 1..206: note = U/M: M (0.81:0.14) in Pancreatic Alpha + Beta + Delta cells
  misc_feature 1..206: note = source = chr17:48610850-48611055; Gene: EPN3,EPN3 (exon,intron)
  source 1..206: mol_type = genomic DNA
cgggaagagggtgtgggctgggctggtgggtgcacagactttacgcaaactcatgcacgtgtgactggacagatctgggttctctccatctctccgaaacccttgctggggatgagcgatctgcatttttcggtcctgacttttgggaaactctccagatccccccatcctgcaggccctgagaagagcagcccctccctactgcg

SEQ ID NO: 6057 - DNA, 89 bp, Homo sapiens
  misc_feature 1..89: note = U/M: M (0.78:0.16) in Pancreatic Alpha + Beta + Delta cells
  misc_feature 1..89: note = source = chr14:93369380-93369468; Gene: CHGA (Intergenic)
  source 1..89: mol_type = genomic DNA
cgcatgaaaacaataagagaaaacaacggaactcggggaccaattgattgaggcgtgggaacgggatggcaggcagtcacaggggtccg

SEQ ID NO: 6058 - DNA, 133 bp, Homo sapiens
  misc_feature 1..133: note = U/M: M (0.94:0.09) in Pancreatic Alpha + Beta + Delta cells
  misc_feature 1..133: note = source = chr2:220196530-220196662; Gene: RESP18 (intron)
  source 1..133: mol_type = genomic DNA
cgagacatctccgcaaggcttggcggtccttccccacggccctcatcctctcattgccaccaggcctcctcccacagctgttcctgaatccgctgcattggcctctaaaaccaaaaatcagggagagggggcg

SEQ ID NO: 6059 - DNA, 106 bp, Homo sapiens
  misc_feature 1..106: note = U/M: M (0.83:0.04) in Pancreatic Alpha + Beta + Delta cells
  misc_feature 1..106: note = source = chr2:220196370-220196475; Gene: RESP18 (intron)
  source 1..106: mol_type = genomic DNA
cgggaaggggagctgattctctgaggcagcgttcccaggactggtgggaaggagtggtgacccgctcgggctcggcgtggacccggagcgcgcctggcgctgtccg

SEQ ID NO: 6060 - DNA, 330 bp, Homo sapiens
  misc_feature 1..330: note = U/M: M (0.87:0.09) in Pancreatic Alpha + Beta + Delta cells
  misc_feature 1..330: note = source = chr7:156815478-156815807; Gene: LOC645249 (Intergenic)
  source 1..330: mol_type = genomic DNA
cggcccagcctccccccagcagcccctggtccaccctgggaaaatgactagctttctttccatctctccactccatctgaacgtgatcggagctatagctaagaggccagcccaagggtgacctgccagacttgagtgcgtgagcgctggctgaggccacacctgctgggcatgtgaggcggcccctccccctgctgtgagtgacactggcctgcactcttctaatctcaaggctccaacgaggctatttaacgtggttcaggtcagcaagtgctttgtgtgacccacttgatactgaaggataaggaggtgcttagaatgccctttccg

SEQ ID NO: 6061 - DNA, 105 bp, Homo sapiens
  misc_feature 1..105: note = U/M: M (0.83:0.06) in Pancreatic Alpha + Beta + Delta cells
  misc_feature 1..105: note = source = chr7:127808701-127808805; Gene: MIR129-1 (Intergenic)
  source 1..105: mol_type = genomic DNA
cgccccaactcgttgtgcccttccctccttggagagtgagtagaagaggggatggggaggaatccgtttccatcccccgcgaccccctcacctagggcggaggcg

SEQ ID NO: 6062 - DNA, 308 bp, Homo sapiens
  misc_feature 1..308: note = U/M: M (0.88:0.11) in Pancreatic Alpha + Beta + Delta cells
  misc_feature 1..308: note = source = chr13:28541256-28541563; Gene: CDX2 (intron)
  source 1..308: mol_type = genomic DNA
cgtgcgccacccccgccaaccgcgccccagacaggggctgtagaaagtgggtctttgggagccaggatctgggagcccctgctaggagaaaggcgcctcctctaggagaagggaccaagccaaagctctgaggctcacccgaggctgatctgtggccttctccccggtcggcggcattcccaccaggactctccctagcatgtgcacagtgacgcagaaaccgatgcccagagacagcccccaaagggcgctttgatttatacagttgtaattggctataaacttctgcaaagtgcccataaccagcg

SEQ ID NO: 6063 - DNA, 298 bp, Homo sapiens
  misc_feature 1..298: note = U/M: M (0.84:0.08) in Pancreatic Alpha + Beta + Delta cells
  misc_feature 1..298: note = source = chr6:41472431-41472728; Gene: FOXP4 (Intergenic)
  source 1..298: mol_type = genomic DNA
cggccgcgtccacgttggtttccttctcgttgtcttggtctctcctgattctgttctcgtgtcagtctgccctgcctctgttactccaaatctctgtggtctctctccctctctaccttctctgtctccttctgaatctgaatatggctcagtgcttctggctttctctttgtctctgaagctatctctctgagaatgtctctgtccctttctgtctgcccctcttcgtgtttctctgtctcaagctgacgctgtctcgtggcctgtctcactgtgtcttcttctgtcctcctcctcg

SEQ ID NO: 6064 - DNA, 345 bp, Homo sapiens
  misc_feature 1..345: note = U/M: M (0.86:0.1) in Pancreatic Alpha + Beta + Delta cells
  misc_feature 1..345: note = source = chr19:13618495-13618839; Gene: CACNA1A,CACNA1A (promoter-TSS,Intergenic)
  source 1..345: mol_type = genomic DNA
cggacgctccccagcatcttgcaaggagaaggcaggatggaggcaggaaaaaaacttaaaagacagaaaagagaaggggatttgtgtctagaggtgcgattcgtcagtctctaaacaaatttgctctgtttagcaaaagaccatttttgaaagtggagagagtggtttggggttacttctgtgaacgtttcaaatcacaaggactcctgcaagttggaattaaaggtttattctaccttggagaccccagaggtgacaagtctgaactcccaggaggaaataattaaccaggtcctagttggctggataggggttctgggtggtatagtttgcttgatactcacg

SEQ ID NO: 6065 - DNA, 246 bp, Homo sapiens
  misc_feature 1..246: note = U/M: M (0.78:0.03) in Pancreatic Alpha + Beta + Delta cells
  misc_feature 1..246: note = source = chr19:591536-591781; Gene: HCN2 (intron)
  source 1..246: mol_type = genomic DNA
cgcgaccatggagggatgcgtgtgtgtttgtgtatccacgagtggggtgtgaggtggggtgtggagggtgcaggtggagggtgtaggtggggcccgccgggctagcgaggccgggcgcgcgggacgggcgcggtttcagcaccacggacagcgcgccggacctgggaagcctgcggttttcccgcctgtctctcctcctccaggcctgggcgccccaggacagcccccacggaccctggacccccg

SEQ ID NO: 6066 - DNA, 443 bp, Homo sapiens
  misc_feature 1..443: note = U/M: M (0.85:0.1) in Pancreatic Alpha + Beta + Delta cells
  misc_feature 1..443: note = source = chr13:28541611-28542053; Gene: CDX2 (intron)
  source 1..443: mol_type = genomic DNA
cgctgagggctggggaaagactttaaaaggggcactcaactaggactctccccaccgcacttccttgccacctctaggcacactcgaacaccagaaggggcagacccagagtcaatgagccccacagtccggcaaacctaggatctttttcagttgcacacacacactcacagacatccctgacacccttgaaaggaagctttgggagaaatgacccctacctggagcggcggcttaattcccaccagggtttcctccccgtctccctgctctctccgcagacgcctgcccctaggcttcttgcccctagccttccagcttttgcttgaaatgaccccttcacaggtcagaggttcagagacggggcgcgcccccgtcgccttagcagctggggctagcaccttcttcccagcgacagcagctctccctggtctgcctgctcg

SEQ ID NO: 6067 - DNA, 20 bp, Homo sapiens
  misc_feature 1..20: note = U/M: M (0.95:0.23) in Pancreatic Alpha + Beta + Delta cells
  misc_feature 1..20: note = source = chr2:73518221-73518240; Gene: EGR4 (exon)
  source 1..20: mol_type = genomic DNA
cgcgcgagaccgccttggcg

SEQ ID NO: 6068 - DNA, 176 bp, Homo sapiens
  misc_feature 1..176: note = U/M: M (0.8:0.11) in Pancreatic Alpha + Beta + Delta cells
  misc_feature 1..176: note = source = chr6:41472032-41472207; Gene: FOXP4 (Intergenic)
  source 1..176: mol_type = genomic DNA
cgcataggaaaggagggtgctgccgaggtggctgcctgggggcgggccctacaggggtcatttggggcatcccctgcctctaggcaaatccccacggagccccatcccgcaccctcccgcagtgtccagggcgaacccctgtccccaagcccaggcttaggagtgaaatctcgacg

SEQ ID NO: 6069 - DNA, 298 bp, Homo sapiens
  misc_feature 1..298: note = U/M: M (0.75:0.06) in Pancreatic Alpha + Beta + Delta cells
  misc_feature 1..298: note = source = chr10:71336088-71336385; Gene: NEUROG3 (Intergenic)
  source 1..298: mol_type = genomic DNA
cggctcagggccctccagggcttgcagttctccatcactcctgctttgcgcaaaaagcagccagggcgaggagcgcgcggtggctgggggcagccgccttcttgagggatgcaaggatttcccgcagtcctcttccagccaggaggccagggccggaggtcaaggagtcttaggcgattagagattgaggatccatgccctctgtctcagctgcaggggacacatagacccctctccaaagttaattcctgtgcctttggctgcggaggcgcaggcggtaatgactccgtgcgcaccg

SEQ ID NO: 6070 - DNA, 351 bp, Homo sapiens
  misc_feature 1..351: note = U/M: M (0.72:0.05) in Pancreatic Alpha + Beta + Delta cells
  misc_feature 1..351: note = source = chr16:89988197-89988547; Gene: TUBB3 (promoter-TSS)
  source 1..351: mol_type = genomic DNA
cgactcctacgcaggctcagtcagcagccccctggccagccccacccctgactgccggcctcagaactgggagctgcttcctggcagggcccgcctctgctgggagaccggacggtgagtcagccttaagcccggcaccagacccctctgaggatggagcaggagctggctgccctgaggctgcaaaacttcttccctcgtggagacagggaggcacctcagacactcaccccggactcccttgaacagggacagggaggaaccccaggcagctagaccccagcagcagccacacgagcacactgtggggcagggaggggcatctcttgagaacaaaagatccatttctcg

SEQ ID NO: 6071 - DNA, 229 bp, Homo sapiens
  misc_feature 1..229: note = U/M: M (0.7:0.05) in Pancreatic Alpha + Beta + Delta cells
  misc_feature 1..229: note = source = chr8:54790614-54790842; Gene: RGS20 (intron)
  source 1..229: mol_type = genomic DNA
cgcgctcgcctcccgcgcctcaccaccccagcactttattcgctgcttcccgcctccaccttcattttttttggcaaccaccgctcttgtttttcacagacagattaaattgttttttgtttggcatgagggggtgtttggattggccgagctacattccggtttgtaactacactaaacgttagtgtaccaagaaactaagagcgtctcaaagatgacagtctgaacg

SEQ ID NO: 6072 - DNA, 79 bp, Homo sapiens
  misc_feature 1..79: note = U/M: M (0.78:0.15) in Pancreatic Alpha + Beta + Delta cells
  misc_feature 1..79: note = source = chr2:73519827-73519905; Gene: EGR4 (exon)
  source 1..79: mol_type = genomic DNA
cgcaggcccctccaggaagcaggagtcggctaagtccccacttgcgccgcagctgttcaaagcccagctcaagaagtcg

SEQ ID NO: 6073 - DNA, 350 bp, Homo sapiens
  misc_feature 1..350: note = U/M: M (0.6:0.04) in Pancreatic Alpha + Beta + Delta cells
  misc_feature 1..350: note = source = chr11:68607274-68607623; Gene: CPT1A (intron)
  source 1..350: mol_type = genomic DNA
cgctcggtgaccactggtccggggccggggccaaacgcagcagccgcagcagtatcggaagggacccagtttaattctcttcccctccagggtaggcggcttgtttttagtaccaactcgaaacgttattttggcctgtgcatgatgccaacttctgccactttgaaacaaagtgtgtgcactcccaaacctggccctttttattgtttgattccaactgttaagatagggttcaagtgcaaggtctaggctagcaatgcttcacaggaaggaaaccagtaatttacatgcgaaaagcagtccacaggctcttggtattgaggcaaaaccaatccaaagaaccagctgcg

SEQ ID NO: 6074 - DNA, 282 bp, Homo sapiens
  misc_feature 1..282: note = U/M: M (0.57:0.02) in Pancreatic Alpha + Beta + Delta cells
  misc_feature 1..282: note = source = chr2:73518277-73518558; Gene: EGR4 (exon)
  source 1..282: mol_type = genomic DNA
cgtggggcgtgtgccagttacaaaagactgtcttgaatcccagggtagtgcctattcactgggtggtctcagaagacttcccccaaagcgcggctgacaagggtgacagcgcctggaccgcgggaactgtccgcggagctggtgctgaatagggcgtgtgcggcgggcgcttcaaggaaactggaagcgggaccggaggccggccctcgggcgtgcgaggaggagttggaagaagagcggggaggggaacggcccggaactcgtgcgcgccgaacggcggcg

SEQ ID NO: 6075 - DNA, 190 bp, Homo sapiens
  misc_feature 1..190: note = U/M: M (0.6:0.08) in Pancreatic Alpha + Beta + Delta cells
  misc_feature 1..190: note = source = chr19:13388075-13388264; Gene: CACNA1A (intron)
  source 1..190: mol_type = genomic DNA
cgcagggcgtgcactgcacaagggcccctcccatctcttttcatactgcagatttgtatgttgtgaatgaaattgtccagcagatggcagcaaatcctaacaaaaaaatcactgtactaggccagttcgctaacccacgggaagggtaccttttaaaatttgccccaagccctgtagtggattagaagcg

SEQ ID NO: 6076 - DNA, 262 bp, Homo sapiens
  misc_feature 1..262: note = U/M: U (0.06:0.88) in Breast Basal + Luminal Epithelium
  misc_feature 1..262: note = source = chr12:27948858-27949119; Gene: KLHL42 (intron)
  source 1..262: mol_type = genomic DNA
cgggcctggagctgagaaatacgtggaagcctcactagaatgagttctttattggttcggtggacagccaggttactaaggagcactttttgttaaataagtgaccaaaatccccttgggccatctcctaaaatgatctttatcataatagctacagtaaaaagaaagaaggagaggtattaatgtgggtggaaatcaggacagtttcctaatgccgtggcttacaattctgagatttctccaggcatcaggacatgtgcgc

SEQ ID NO: 6077 - DNA, 140 bp, Homo sapiens
  misc_feature 1..140: note = U/M: U (0.12:0.94) in Breast Basal + Luminal Epithelium
  misc_feature 1..140: note = source = chr3:150491825-150491964; Gene: SIAH2 (Intergenic)
  source 1..140: mol_type = genomic DNA
cgagtgtgggttcaagctactacgcacagctaggcatgccggctgctgtgatggggcgggcacttccaggcaccagcacaggtgccagctctgtggaaggctgctgctggaccagatgtaccacatacggcttcggctgc

SEQ ID NO: 6078 - DNA, 35 bp, Homo sapiens
  misc_feature 1..35: note = U/M: U (0.06:0.86) in Breast Basal + Luminal Epithelium
  misc_feature 1..35: note = source = chr8:47144675-47144709; Gene: LINC00293 (Intergenic)
  source 1..35: mol_type = genomic DNA
cggaaagcccgcagaagcgaaaacggacacacatc

SEQ ID NO: 6079 - DNA, 242 bp, Homo sapiens
  misc_feature 1..242: note = U/M: U (0.09:0.88) in Breast Basal + Luminal Epithelium
  misc_feature 1..242: note = source = chr16:1478098-1478339; Gene: C16orf91 (Intergenic)
  source 1..242: mol_type = genomic DNA
cgcgtcccggctcctggccgctgcctccagctccaaagccagcagcgtggcctcttccatcctctcagcctcctgcctccctccaacaaggatccaccaggtgaccgcctgtctccaggtccttcgcttagccacgcccgccgtccctcagctgtgtcggtgctgggggttcgggcgcggacgtcctggggccatcacagggccggtgtttccaggctgtccgctccgcgggaaccccttcc

SEQ ID NO: 6080 - DNA, 266 bp, Homo sapiens
  misc_feature 1..266: note = U/M: U (0.13:0.92) in Breast Basal + Luminal Epithelium
  misc_feature 1..266: note = source = chr2:127240232-127240497; Gene: GYPC (Intergenic)
  source 1..266: mol_type = genomic DNA
cggagccgcatcgccagccggagacctccacggccagcgacaccacccactggatctcattcatcctgggctccctgcagaaggcaccctgcccactcagcctggtgggcttcacttggcttgcagtcccccctagatcccatgctagccgaaggatctgcgttcagcctgaatctgggcaggacgtgccacaacctgtttctgccttgggcgccagcacctggctgaagggaacgcagtgccaaaacagggatgccagtgacccc

SEQ ID NO: 6081 - DNA, 170 bp, Homo sapiens
  misc_feature 1..170: note = U/M: U (0.14:0.92) in Breast Basal + Luminal Epithelium
  misc_feature 1..170: note = source = chr3:126775127-126775296; Gene: PLXNA1 (Intergenic)
  source 1..170: mol_type = genomic DNA
cgagtgcagcgcttgtgggccggcactgctgggggacctggcgcaccctccgcagctgttggcccaggtgccaagcccctcactgcccggggctggcgagttggccggctgctccaagtgcggggcctgccaagcccacacccatccggaactctagctggcccacaagc

SEQ ID NO: 6082 - DNA, 228 bp, Homo sapiens
  misc_feature 1..228: note = U/M: U (0.07:0.85) in Breast Basal + Luminal Epithelium
  misc_feature 1..228: note = source = chr11:22412519-22412746; Gene: SLC17A6 (Intergenic)
  source 1..228: mol_type = genomic DNA
cgcccaggctggagtgcagtggtgcgatctcggctcactgcaagctccgcttcctgggttcacaatgttggcatttatttaaatgcctccaggccaatttggccctcagatttggactcagaaatctctgggctggtgcatgatttgggccttcctcaggcatctcttacagaatactccaggctgatttcctggcaaggctcagggctaatgtcatgccttcttctc

SEQ ID NO: 6083 - DNA, 59 bp, Homo sapiens
  misc_feature 1..59: note = U/M: U (0.04:0.82) in Breast Basal + Luminal Epithelium
  misc_feature 1..59: note = source = chr10:119314894-119314952; Gene: EMX2OS (Intergenic)
  source 1..59: mol_type = genomic DNA
cggggagttgagaaaccaacgacaaacctccacatcgcccgcagccacctctcttgttc

SEQ ID NO: 6084 - DNA, 152 bp, Homo sapiens
  misc_feature 1..152: note = U/M: U (0.07:0.84) in Breast Basal + Luminal Epithelium
  misc_feature 1..152: note = source = chr20:60395236-60395387; Gene: CDH4 (intron)
  source 1..152: mol_type = genomic DNA
cgccttccacctacacagcaaccagcggctctcactggctgctgcctggcatgagaacttggcatccccaagaccgccttccacctacacagcgaccagcggctctcactggctgctgcctggcataagaatgccctgtgtccgtgggggac

SEQ ID NO: 6085 - DNA, 270 bp, Homo sapiens
  misc_feature 1..270: note = U/M: U (0.11:0.88) in Breast Basal + Luminal Epithelium
  misc_feature 1..270: note = source = chr10:19443233-19443502; Gene: ARL5B (Intergenic)
  source 1..270: mol_type = genomic DNA
cggcattgacttgtatctaggaaaatcactctctgaatacggtattttccaatgaaaatagttggttttccaaattgcctatcactgtgactatcaaagggcagtatcagaccttgacattgttgggtatagccttccttgtaagtcttcaatattcagtgaaactaccccagacagcagctctgaacctgtgatcttttaagctgctgagagatgttatcccctgcacatttgccatgagcacatccgtcgtagttaaaatctaaaagc

SEQ ID NO: 6086 - DNA, 208 bp, Homo sapiens
  misc_feature 1..208: note = U/M: U (0.14:0.9) in Breast Basal + Luminal Epithelium
  misc_feature 1..208: note = source = chr13:39540888-39541095; Gene: STOML3 (exon)
  source 1..208: mol_type = genomic DNA
cgtttctaactactggcttctccataggaatagacaccactctctatgcaatagctgactaccgcaagaggacctcaggctttatttggaagcttcttgtggttatcatagctgacgccaccaatgccctctagtatattcatgggcagaggaaacacaatcgtagaattcttctcggtggctaccgtgctcaaggtctgcaggtagc

SEQ ID NO: 6087 - DNA, 93 bp, Homo sapiens
  misc_feature 1..93: note = U/M: U (0.15:0.9) in Breast Basal + Luminal Epithelium
  misc_feature 1..93: note = source = chr18:57090982-57091074; Gene: LMAN1 (Intergenic)
  source 1..93: mol_type = genomic DNA
cggattcagcacataagttgtcacttcgccagaatcgatgagaatcaggagtccctgaatcgcctggggatgctggtgaaagcgacaccatgc

SEQ ID NO: 6088 - DNA, 96 bp, Homo sapiens
  misc_feature 1..96: note = U/M: U (0.16:0.88) in Breast Basal + Luminal Epithelium
  misc_feature 1..96: note = source = chr8:47145602-47145697; Gene: LINC00293 (Intergenic)
  source 1..96: mol_type = genomic DNA
cgggacgttgaggcgggcagcgagtaaaagcgtcaagaccacaggaagtgctgggagcctcccaaggaggcctctcccatcccagaaaccgcccgc

SEQ ID NO: 6089 - DNA, 199 bp, Homo sapiens
  misc_feature 1..199: note = U/M: U (0.22:0.93) in Breast Basal + Luminal Epithelium
  misc_feature 1..199: note = source = chr19:20056294-20056492; Gene: ZNF93 (Intergenic)
  source 1..199: mol_type = genomic DNA
cggatttttctcctccgatcctgatacctatatcaaagaatgtacgtatcttactcagtcttatgaactcacttggcatgatctctatattatcctgtcttttaccctccttctggaaaagaaggaaagagtgtggctcgcagccccgacgcgtgctgatgatctccatcagcaagattttaccaagcccataggagcc

SEQ ID NO: 6090 - DNA, 344 bp, Homo sapiens
  misc_feature 1..344: note = U/M: U (0.15:0.86) in Breast Basal + Luminal Epithelium
  misc_feature 1..344: note = source = chr1:204406713-204407056; Gene: PIK3C2B (intron)
  source 1..344: mol_type = genomic DNA
cgacagcaaagagctgaacaaaatcaatggtaacaaaataggaagaagaggacagatttgagagatagctgggaagaagaataaacagagcatggtacagaagtgagatagagggaagcatcaggaagaccgtggctttggcttgggtaaatgcacagaaagagtcacaccattgactgatagcaaacacaaaaagcaggtttcaagaggcaaaggagagacagcaggctcagttttgcctacaccgagtttgagacgtgggtgaaacgtaggtggaaaagtccagcaagaaggtggctatagaaccacctggaggaagggaagagggctagaggaatggcttc

SEQ ID NO: 6091 - DNA, 343 bp, Homo sapiens
  misc_feature 1..343: note = U/M: U (0.1:0.93) in Breast Basal + Luminal Epithelium
  misc_feature 1..343: note = source = chr10:109305382-109305724; Gene: SORCS1 (Intergenic)
  source 1..343: mol_type = genomic DNA
cgctgtgtgcgacaagaagaagagaagacttgtggcttttcagggaacccagacctaggggctccccaagccagggatgtaacactcttttgggggctctgtggtttctggcgtctccaagcttttgggtgccaccgcatctccccgtcccggacgcctgtgcctgcagcaagccgcttgcagtacgtcttgtccagctgcagcctcacatggagccggcgcctgtgccaatgcctagagctgcctgtcccgccacagcagccaggcagctctaggcactggctgtgcctggctgtgcgcaatggccgaaccctgtacgcgctcaccagcatattccttgccg

SEQ ID NO: 6092 - DNA, 139 bp, Homo sapiens
  misc_feature 1..139: note = U/M: U (0.06:0.85) in Breast Basal + Luminal Epithelium
  misc_feature 1..139: note = source = chr1:2832006-2832144; Gene: ACTRT2 (Intergenic)
  source 1..139: mol_type = genomic DNA
cgcaactctggaaaccttccggtgtggggccaccccctcccaccatgctgacaattcctgagggacaaaagctgcagaaggctaggccagtgcacgtgtccacacgtgcacacatacacactcctacaacacacacacg

SEQ ID NO: 6093 - DNA, 197 bp, Homo sapiens
  misc_feature 1..197: note = U/M: U (0.11:0.9) in Breast Basal + Luminal Epithelium
  misc_feature 1..197: note = source = chr2:236055974-236056170; Gene: SH3BP4 (Intergenic)
  source 1..197: mol_type = genomic DNA
cgtaggttattctttagctgttcagccgcttgcgtgcaacctgaaaactttgaaaaattttgaactggcagaatgcgcgagcgaattctccccttgaatttcattctcgtagattaagatgctagctggaggctaaaatcagatgccacacttcttggcagcgcacatcattcccacacacacttcagaggatatcg

SEQ ID NO: 6094 - DNA, 109 bp, Homo sapiens
  misc_feature 1..109: note = U/M: U (0.09:0.87) in Breast Basal + Luminal Epithelium
  misc_feature 1..109: note = source = chr7:47786883-47786991; Gene: LINC00525 (Intergenic)
  source 1..109: mol_type = genomic DNA
cgatggcaaagagagctcctgatttctcctgccgagccttcccgggcatgctgtaatcttaggatcagatcagcttctgtgttctgtgttccttccgcctccgtatccg

SEQ ID NO: 6095 - DNA, 300 bp, Homo sapiens
  misc_feature 1..300: note = U/M: U (0.11:0.89) in Breast Basal + Luminal Epithelium
  misc_feature 1..300: note = source = chr6:777457-777756; Gene: EXOC2 (Intergenic)
  source 1..300: mol_type = genomic DNA
cgcatgctctttttttgcaatggtgagaaatttagaaaaaataaatctgatgtggccttcgagtgcacgccagatcatgggacaggatctctggctgccgtacctgcctcccgcccccgtgggacttggacagagcatgaccaaatgccagggcaaaccctgaggcacctaggagaggagaccacacagagtaaggtaacctggggcaggagagtacgtccagggggtgcgatcctgtcccaggcacgaagccaggctgtgtggagggatgggagaggggacttcccctgggacgctgcg

SEQ ID NO: 6096 - DNA, 53 bp, Homo sapiens
  misc_feature 1..53: note = U/M: U (0.08:0.85) in Breast Basal + Luminal Epithelium
  misc_feature 1..53: note = source = chr18:76079910-76079962; Gene: SALL3 (Intergenic)
  source 1..53: mol_type = genomic DNA
cgcgtggagtttctctgttttccgagacggcttactcggcgcctagtgagccg

SEQ ID NO: 6097 - DNA, 481 bp, Homo sapiens
  misc_feature 1..481: note = U/M: U (0.12:0.89) in Breast Basal + Luminal Epithelium
  misc_feature 1..481: note = source = chr14:96013460-96013940; Gene: GLRX5 (Intergenic)
  source 1..481: mol_type = genomic DNA
cgacaggaaaagatatatattaggggatggccacacaaaacactgattgttttaaaaatttaacattccacttaagaattgtttagtaaatctaaaaagcagctttaaattgtgcctaagaaccatataatagctactatgaagcagagcagaggaatggtgaagagaaaagccattttaaggtccaggggcttacagagacgcatggggtgaccaggtggactcttgtaaagccacattcctgtcttatttcctgagagtagcatcactttaggtctgaaagctatgtgggcattttgcgtgaggggagcattgttttcttggcggttgccctgggagcccagtgcaggtgagctgagggcagagtctcccttagggcagagatgccactgaaggtgcacctcacctcaaagatccctatcctggattcagtcagaatagccatgttattctcctccttgtgaacctcccggggcacccg

SEQ ID NO: 6098 - DNA, 178 bp, Homo sapiens
  misc_feature 1..178: note = U/M: U (0.1:0.85) in Breast Basal + Luminal Epithelium
  misc_feature 1..178: note = source = chr19:28351260-28351437; Gene: LINC00662 (Intergenic)
  source 1..178: mol_type = genomic DNA
cgaacacaggcattctaaggggagagccacctggccgaccacaggcattttaaggagaaagatacctggccgacctcaggcattctaacgagtgtgtctcctggccgacctcaggcattctgacgagggacaactggccaacctcagggattccaacagggcagacacaacgttgacg

SEQ ID NO: 6099 - DNA, 433 bp, Homo sapiens
  misc_feature 1..433: note = U/M: U (0.06:0.81) in Breast Basal + Luminal Epithelium
  misc_feature 1..433: note = source = chr10:2271089-2271521; Gene: LINC00701 (Intergenic)
  source 1..433: mol_type = genomic DNA
cgatggggctggggagctggtggtgaaggacatatcgtctgtctgttgtgaatggatgaacttcagccctatcccttaatagcaaaatttcctaacaaaagcaaaattatctgtgttgcacaaaaaaaaaaaaaaaaaaatctaggacaaagggaattattgatagatgatgaggcaaggtgcctcaaagctgttctatggtattagccaactcttccctctggcaaagctaaacagaagaggaatttcattatcagggtgggggcatcagaggtcccccggcagagattcccgcagagactgccatgtatggacacctgggcaagattcacacagttacaagtctcagcttcttttttttttttttttttttttttttttgagacagagtctcactctgtcgcctaggctggagtgcagtggcgcaatctcg

SEQ ID NO: 6100 - DNA, 83 bp, Homo sapiens
  misc_feature 1..83: note = U/M: U (0.16:0.9) in Breast Basal + Luminal Epithelium
  misc_feature 1..83: note = source = chr2:116372189-116372271; Gene: DPP10 (intron)
  source 1..83: mol_type = genomic DNA
cgggttttcgttatgttggccaggctggtctgaaactcctgacctcaggtgatcctcccacctcggccaggcgtaagcaaccg

SEQ ID NO: 6101 - DNA, 109 bp, Homo sapiens
  misc_feature 1..109: note = U/M: U (0.06:0.8) in Breast Basal + Luminal Epithelium
  misc_feature 1..109: note = source = chr20:62012031-62012139; Gene: CHRNA4 (Intergenic)
  source 1..109: mol_type = genomic DNA
cggcaggtgtggggtccacgcgggtagcatgagccaagcccaacctcctgggccgagtgggcggaatgagcccagagggccccagcaaaccttggcaaaggtgccaccg

SEQ ID NO: 6102 - DNA, 160 bp, Homo sapiens
  misc_feature 1..160: note = U/M: U (0.12:0.86) in Breast Basal + Luminal Epithelium
  misc_feature 1..160: note = source = chr16:1477888-1478047; Gene: C16orf91 (Intergenic)
  source 1..160: mol_type = genomic DNA
cgggacaggtggggtcacgggcggggtcacaggcaggcccccagcacccgagtcagaggacagcgggaaaacccagggccctggggcgggagaagcgtgcggccttgctggggaagcaggtcacccctctgaggctttctctccaggggcgggggaagcg

SEQ ID NO: 6103 - DNA, 176 bp, Homo sapiens
  misc_feature 1..176: note = U/M: U (0.13:0.87) in Breast Basal + Luminal Epithelium
  misc_feature 1..176: note = source = chr1:41889792-41889967; Gene: EDN2 (Intergenic)
  source 1..176: mol_type = genomic DNA
cggctctgccctttcttcttaggttcaggctaaggccggctgtgccggaggggcacaacacctgagtggagatgagcagcccaggggcgccctgctggcccgcaccctgcccagaccacatgaaggcgaagaggttgctgagtgagtggcgggggtgtgggatggaattgtgtacg

SEQ ID NO: 6104 - DNA, 238 bp, Homo sapiens
  misc_feature 1..238: note = U/M: U (0.17:0.91) in Breast Basal + Luminal Epithelium
  misc_feature 1..238: note = source = chr2:9289261-9289498; Gene: ASAP2 (Intergenic)
  source 1..238: mol_type = genomic DNA
cgcctaatctgcaagagtgctggctgcactggctgggaatgacagtccccacacagcccttcagatgacaccaagagtgagggacagggaagggtcaggggcttgccctggctccagcaagcacccggcttgcaactgctgccacccaggccggggagtcctagggcctgcacccgcctcagctgctgctcctgcggctctgctgattgcccgactgggaaattcggggggttgcccg

SEQ ID NO: 6105 - DNA, 94 bp, Homo sapiens
  misc_feature 1..94: note = U/M: U (0.16:0.89) in Breast Basal + Luminal Epithelium
  misc_feature 1..94: note = source = chr2:16362594-16362687; Gene: MYCNOS (Intergenic)
  source 1..94: mol_type = genomic DNA
cgtctgcaggaccctgattctcgcacgtagctgccatggccgggaagccaggcgtggtctggctgaagacactcggtctgtgttctgaatgtcg

SEQ ID NO: 6106 - DNA, 128 bp, Homo sapiens
  misc_feature 1..128: note = U/M: U (0.15:0.88) in Breast Basal + Luminal Epithelium
  misc_feature 1..128: note = source = chr16:88147033-88147160; Gene: BANP (Intergenic)
  source 1..128: mol_type = genomic DNA
cggctcttccagctggtgagttgccatggcttctggcgctttgacacctggtgacaggagagcctgctgagcagggatccagccctgtggacgcaggacgtgaggacctgtggctgaagcccggctcg

SEQ ID NO: 6107 - DNA, 223 bp, Homo sapiens
  misc_feature 1..223: note = U/M: U (0.12:0.85) in Breast Basal + Luminal Epithelium
  misc_feature 1..223: note = source = chr11:119792334-119792556; Gene: PVRL1 (Intergenic)
  source 1..223: mol_type = genomic DNA
cgcctcggagatgattatctgtgaggctccttgcaccccaggctgtgggcagcacttggctgcagagtcgcttggaggagattggcacaggggagtcgcttggaggagattggcacaggggagttgcttggaggagattcgcacaggggttggcggaagccaggaggccagagggcctggaggtggagtaggagtcccctggctctgcactgctcagcttccg

SEQ ID NO: 6108 - DNA, 193 bp, Homo sapiens
  misc_feature 1..193: note = U/M: U (0.15:0.87) in Breast Basal + Luminal Epithelium
  misc_feature 1..193: note = source = chr5:24295521-24295713; Gene: CDH10 (Intergenic)
  source 1..193: mol_type = genomic DNA
cgtttagaaaatcactgtccgccgtggtatttcatgacatcttacttggcattgctctacatttttctcttacgaaaatatgcccatactggaatctccctacagcaaaatgacccgagttttttttgttcgttcgtttttttgagacggagtcttgctgtcgcccaggctggagtgcagtggtgcgatctcg

SEQ ID NO: 6109 - DNA, 264 bp, Homo sapiens
  misc_feature 1..264: note = U/M: U (0.12:0.84) in Breast Basal + Luminal Epithelium
  misc_feature 1..264: note = source = chr14:95462015-95462278; Gene: MIR3173 (Intergenic)
  source 1..264: mol_type = genomic DNA
cgggaaggtactttcttttctcagagaccggaagcaactggaccctgcggggacaggagtcaagggagagagtggacatcttccgctgccaaggatcggggatcaaaggggaagggggtcggagaacattcctgcctcccactgttggtaactccctggaagggggacagagatgcccggggcagggtcccccagagcagggaagcaactggaaccatattagctatgtgtattactatcgttagtaataaatagcctggcccg

SEQ ID NO: 6110 - DNA, 65 bp, Homo sapiens
  misc_feature 1..65: note = U/M: U (0.1:0.81) in Breast Basal + Luminal Epithelium
  misc_feature 1..65: note = source = chr16:1478441-1478505; Gene: C16orf91 (Intergenic)
  source 1..65: mol_type = genomic DNA
cgacgaggccgagctgaggtccacctgcgcccgaagcctgggctggccatttcctgccgcccgcg

SEQ ID NO: 6111 - DNA, 74 bp, Homo sapiens
  misc_feature 1..74: note = U/M: U (0.1:0.81) in Breast Basal + Luminal Epithelium
  misc_feature 1..74: note = source = chr12:132984025-132984098; Gene: FBRSL1 (Intergenic)
  source 1..74: mol_type = genomic DNA
cggggacctgtgcggccccagcacccgttccactgatgcttggtgtgggcggtggctcgaccccttcgaccgcg

SEQ ID NO: 6112 - DNA, 79 bp, Homo sapiens
  misc_feature 1..79: note = U/M: U (0.18:0.89) in Breast Basal + Luminal Epithelium
  misc_feature 1..79: note = source = chr2:118134453-118134531; Gene: DDX18 (Intergenic)
  source 1..79: mol_type = genomic DNA
cggggtttcgccatgttggccgggtgatctcaaactcctgacctcaggcaatccgcccacctcggcatcccaaagtacg

SEQ ID NO: 6113 - DNA, 116 bp, Homo sapiens
  misc_feature 1..116: note = U/M: U (0.12:0.83) in Breast Basal + Luminal Epithelium
  misc_feature 1..116: note = source = chr5:4340164-4340279; Gene: LOC340094 (Intergenic)
  source 1..116: mol_type = genomic DNA
cggagggagcatgtgagcaagtgagtgcaggacctgactatccgctctgggcactggcaggaccaagctccgtgtggggcccatggccagaccaggcggaggtgcctgcgaccccg

SEQ ID NO: 6114 - DNA, 203 bp, Homo sapiens
  misc_feature 1..203: note = U/M: U (0.12:0.83) in Breast Basal + Luminal Epithelium
  misc_feature 1..203: note = source = chr5:177513083-177513285; Gene: N4BP3 (Intergenic)
  source 1..203: mol_type = genomic DNA
cgaggtagcgccactgcactgcagcctgggcgacggagtgagactccgtctcaaaaaaaaaaaaaaaaaaaaagaagaagaaaagtaaagaaaaagagaacctggttatctgcagttgcaatttacctgagtgttctgtatttttatttgctaaatcagcagactcgacaaggcacactgaacaagtggacagtgcgccggcg

SEQ ID NO: 6115 - DNA, 250 bp, Homo sapiens
  misc_feature 1..250: note = U/M: U (0.12:0.83) in Breast Basal + Luminal Epithelium
  misc_feature 1..250: note = source = chr18:76080046-76080295; Gene: SALL3 (Intergenic)
  source 1..250: mol_type = genomic DNA
cgaacactaaaacacagcagaaatatgacgaaacaccctgcaaccttgtttcttttgagttcctatcgctcacttcaatctattctaaaaataaaggacttgtcaggcctaatgataagggagagttttagggaaataaagagagctgaactgacacagacataataatgtcaagatataaatcacagagtccttctgccattttcattatctgcctcggaggattacggtgcttgctataaatgagacg

SEQ ID NO: 6116 - DNA, 272 bp, Homo sapiens
  misc_feature 1..272: note = U/M: U (0.18:0.89) in Breast Basal + Luminal Epithelium
  misc_feature 1..272: note = source = chr8:23227916-23228187; Gene: LOXL2 (intron)
  source 1..272: mol_type = genomic DNA
cggaccctcaggcccaagggacagaaaccacctctttgtcatttctgctcagcaacacatctgcctctggatgtatcaggctaccttgcagtagataaagctacctgccaagaacaactagaaaaggaaggtaaaatattaaaaacatatgttcgaagacacgagaaagctaccgaggcaccaaggactgaaggaaccaagaatccagagagatgggaagggcattgaggtgaggctcacttttgtctctgctttcccccggaagatactcg

SEQ ID NO: 6117 - DNA, 313 bp, Homo sapiens
  misc_feature 1..313: note = U/M: U (0.12:0.83) in Breast Basal + Luminal Epithelium
  misc_feature 1..313: note = source = chr11:117928221-117928533; Gene: TMPRSS4-AS1 (intron)
  source 1..313: mol_type = genomic DNA
cgctgggcgctggaggcagtgccgttgctgtggtcactgctctgtggccaaaggacttttcagcacccaggtgcaggggtgatgtgggtggatggctggcctgccccagggctgcagtgttgctggccaggtgtgggagaagaacaaggatgaaggtattatatttgcaagtgagtggtatgttgaggggattcgcctcggaggctgaaagcaaagccaggaaggagctgatgaaatgagagaaatcggaggtgtgatgagagaaattggaggtgtcgggagctgggattctttatgaggcagacagcaggcg

SEQ ID NO: 6118 - DNA, 360 bp, Homo sapiens; identical to SEQ ID NO: 2692
  misc_feature 1..360: note = U/M: U (0.17:0.88) in Breast Basal + Luminal Epithelium
  misc_feature 1..360: note = source = chr9:9559677-9560036; Gene: PTPRD (intron)
  source 1..360: mol_type = genomic DNA

SEQ ID NO: 6119 - DNA, 147 bp, Homo sapiens
  misc_feature 1..147: note = U/M: U (0.18:0.88) in Breast Basal + Luminal Epithelium
  misc_feature 1..147: note = source = chr8:144318170-144318316; Gene: ZFP41 (Intergenic)
  source 1..147: mol_type = genomic DNA
cgctgttcgttacagctctgtaagaaaaggcgcgtctgtgtcccaggtcctggctgctgccaggtgacagagagatgggaaacagaaggttgtaaagaaatatgcccccaaaatacattcctgactatgcgtcctcacggacagacg

SEQ ID NO: 6120 - DNA, 293 bp, Homo sapiens
  misc_feature 1..293: note = U/M: U (0.2:0.9) in Breast Basal + Luminal Epithelium
  misc_feature 1..293: note = source = chr6:120792972-120793264; Gene: C6orf170 (Intergenic)
  source 1..293: mol_type = genomic DNA
cgcagttgctggcatcgtcaagtgttagggcgccattgcatttttctcatctagactctggcacccaatgtgaaaactgcccgcagcatgaccagtccacccacgggctgagtgcggagtctctgttaaggcactggatccaggccagggtgcgagcctggtgggcctcagtgaggccccgggcagaggtcacagcagccacagagatttccagctggcgaaacaccaccgaaggaattctgtaacaatgcccctttgcaattcagcgctccatcaggtaaatactgattccg

SEQ ID NO: 6121 - DNA, 104 bp, Homo sapiens
  misc_feature 1..104: note = U/M: U (0.12:0.81) in Breast Basal + Luminal Epithelium
  misc_feature 1..104: note = source = chr20:62044824-62044927; Gene: KCNQ2 (exon)
  source 1..104: mol_type = genomic DNA
cgggacagcatgtccaggtggccggctgagtactgctcgatgacgtccatcacgtcgtagggccgcaggctctccttgaacttccgcttggacaccaggaaccg

SEQ ID NO: 6122 - DNA, 122 bp, Homo sapiens
  misc_feature 1..122: note = U/M: U (0.1:0.79) in Breast Basal + Luminal Epithelium
  misc_feature 1..122: note = source = chr20:55277556-55277677; Gene: TFAP2C (Intergenic)
  source 1..122: mol_type = genomic DNA
cgtgtgaccagggccctcctcagggacacggccattctgagactcaagctgactcaccaggagtggcaacgacaacagaaggcccttcgaatagcaatgttcccatttagtggacatccccg

SEQ ID NO: 6123 - DNA, 272 bp, Homo sapiens
  misc_feature 1..272: note = U/M: U (0.15:0.84) in Breast Basal + Luminal Epithelium
  misc_feature 1..272: note = source = chr10:129333736-129334007; Gene: NPS (Intergenic)
  source 1..272: mol_type = genomic DNA
cggatctggggagacctattcactatcagtaggacagcatgagaaacacctgcccccatggttcaattacctcccaccgggtccctcccacaacatgtgggaattcaagatgagatttggatggggacacagccaaaccatatgaccaaatttacaagttgttttaaggaccaaatacctgaaagagcttgaaaaaaaatgagtgtgttatccaaatgcaagactcgaaacacactattgttagtggttttcaggttggagccccgcaggcg

SEQ ID NO: 6124 - DNA, 358 bp, Homo sapiens
  misc_feature 1..358: note = U/M: U (0.17:0.85) in Breast Basal + Luminal Epithelium
  misc_feature 1..358: note = source = chr13:45956569-45956926; Gene: TPT1-AS1 (intron)
  source 1..358: mol_type = genomic DNA
cgatggtggtcctaagagccagagggggaagaggggctggctctgagtctccgcctcgcgggggttgcctccccccctgcgatgggggtcctaagagcctggggcggaagagaggctggctctcagtccgtgcctcgcagagggtgtcatcgcccctgcgatgggggtcccaagagccagcgggggaaaaggggctgactctcagccaccacaaaatggggagcctttatgttcaggttttgcccaagagtcagcttatttgcttcttgtactagcagggcagttgctgccaaggccctcaaacaggggagccatccttcagaaaccctgtctagttgttcagagacgtaggccaccg

SEQ ID NO: 6125 - DNA, 409 bp, Homo sapiens
  misc_feature 1..409: note = U/M: U (0.18:0.86) in Breast Basal + Luminal Epithelium
  misc_feature 1..409: note = source = chr1:187261133-187261541; Gene: PLA2G4A (Intergenic)
  source 1..409: mol_type = genomic DNA
cggcataattacacagaatacttgaagtttaaaaatctttatgtaagtgtgagattataatcagaacttgatgtcgcctatagtcagggtctgattaatatacttatattaaatgtcaaaaataggatttaatgttctctttctaaaaatagaagctaataaaatgaaataattaagcttataattaagaacacagatactcctcgtctttgtcttcttagtgggtaactaattcaggcgacacttagaagtcttgaaaaataagttttgaaggttgtgcacactctctcactggggtcataaaataaatgagtactgtctacaaataatatttaccaagagacaatgtccttctttaactcccacccccccgccagaattgtctttaatactcattagttttcacacg

SEQ ID NO: 6126 - DNA, 455 bp, Homo sapiens
  misc_feature 1..455: note = U/M: U (0.18:0.86) in Breast Basal + Luminal Epithelium
  misc_feature 1..455: note = source = chr8:60347041-60347495; Gene: TOX (Intergenic)
  source 1..455: mol_type = genomic DNA
cgtcctcctcctctcctggaaactccacaagctgcagccagagggactagtgctaatgggagccctgaggctgaagctgtttgcttctttggtatatccaattctgcatgttagagatgagctaatctctgacttcagtttaggggaaataaagagaggaaagaaagaaaacataaggggaaaggaatttgggaaactgggactgggggcttgtatctgctccttagttagtaccattttctctagctcctcctacctcatcactgaagttctgactctgaccctagtggtgaatctaaaaagggcacagctgccatttccatgttatcacaaataaagagaatggcggttaagttagttggtacaggattcacggtttatttttatttactttcatctgtgaccaaagatttctatttggtgccagaactcttcaaagcagccagaattgcgcg

SEQ ID NO: 6127 - DNA, 241 bp, Homo sapiens
  misc_feature 1..241: note = U/M: U (0.16:0.83) in Breast Basal + Luminal Epithelium
  misc_feature 1..241: note = source = chr8:144209697-144209937; Gene: LY6H (Intergenic)
  source 1..241: mol_type = genomic DNA
cgcaggatgccaggcaaatgcaccccagagaactggacaattggaaaatccccagggtgccctcaggaatgggaattcctgccaaaaactcctgttgccagctcagaaggggttgaatggtagcgccttggtcagatcccagaatgcgcccagcaggttagggaaggagccagcaggagggagcatggggtccccttgtgcccagcgcaacaactagcatgagaagaaaccacatccaccg

SEQ ID NO: 6128 - DNA, 244 bp, Homo sapiens
  misc_feature 1..244: note = U/M: U (0.22:0.89) in Breast Basal + Luminal Epithelium
  misc_feature 1..244: note = source = chr4:7158963-7159206; Gene: SORCS2 (Intergenic)
  source 1..244: mol_type = genomic DNA
cgaggggctggaccgcatcagtgacagtgagccagaagtggacagatccttgcagatactgcactgtggcaaataatcttaattggtgaagttgtagtgaggccatcctggatagccagtgccccaggccaccagcagacagagacagagatgacatcagaccacttgctcggagcaaaagccttggagtcatcctggaatggcatcttcctcccgtgccccacggtcagtatgtcagcacacg

SEQ ID NO: 6129 - DNA, 268 bp, Homo sapiens
  misc_feature 1..268: note = U/M: U (0.22:0.89) in Breast Basal + Luminal Epithelium
  misc_feature 1..268: note = source = chr16:30635481-30635748; Gene: ZNF689 (Intergenic)
  source 1..268: mol_type = genomic DNA
cggcagatgcagttgtcagcttgcccacatcctgcatccatgagaacagtttgctgtttgctcatatagcctccagtggtatactgagttggtcacaaccctcattctttcggcctccaacacacaaacatggggacggtcaccagagtggatttcctggtattggaccaacagtgagatggaggcaaagagctgcccacggtcaagacatgcctacggcttctccctcatgtgtgtgcctgtgggtggccagagccccacttgttcg

SEQ ID NO: 6130 - DNA, 52 bp, Homo sapiens
  misc_feature 1..52: note = U/M: U (0.16:0.82) in Breast Basal + Luminal Epithelium
  misc_feature 1..52: note = source = chr1:4177851-4177902; Gene: LOC728716 (Intergenic)
  source 1..52: mol_type = genomic DNA
cgctgcaaaaggcagggacggcacgtcctgcagtgtgcctcgctaagggccg

SEQ ID NO: 6131 - DNA, 146 bp, Homo sapiens
  misc_feature 1..146: note = U/M: U (0.22:0.88) in Breast Basal + Luminal Epithelium
  misc_feature 1..146: note = source = chrX:6987383-6987528; Gene: HDHD1 (intron)
  source 1..146: mol_type = genomic DNA
cgaggtcatctgggagagcaagatgccccaaggctagtgttctggacacggacgtaaggctactcgggctggataaaggcaggacctgagaaccaggggccgggcacctcagggttgtttagaaacaaggatgccacgtgcgctcg

SEQ ID NO: 6132 - DNA, 425 bp, Homo sapiens
  misc_feature 1..425: note = U/M: U (0.22:0.88) in Breast Basal + Luminal Epithelium
  misc_feature 1..425: note = source = chr1:224638084-224638508; Gene: WDR26 (Intergenic)
  source 1..425: mol_type = genomic DNA
cgtgggaagaccctgtctactgaatggccagggagggcctctctcaggggtacccttgaggctgagatctgaatgaactactctcgtgaagatcagggtaaagagcattccaggcagagggaacagataatacaaaggacttagggtaagaacgaactgacttttagaataaacaccctggttagctaaagccaaggcattaaaaggacacaatgaagaaaatgcctctaagggagatagaaccgaagggagatcatagctggttgtggagccaaaggtaaattattctttaagatgtactagatacttattggcagctgctaatagcaaaataaaaaaggtcctgttgttcacaactgaggcacaaaagtacttaggaatgtagggagcagacaccccctccacatttcacttggagccatgcg

SEQ ID NO: 6133 - DNA, 128 bp, Homo sapiens
  misc_feature 1..128: note = U/M: U (0.21:0.86) in Breast Basal + Luminal Epithelium
  misc_feature 1..128: note = source = chr20:54781721-54781848; Gene: MC3R (Intergenic)
  source 1..128: mol_type = genomic DNA
cgaggagatccagttaaaaaaataagcaagtaaatgtgcacaaatgttattttaggaaaaaattggtgaggacaaaaccaagtcatggtgccttttggcgaacccgtccttcccggtgcaagtcatcg

SEQ ID NO: 6134 - DNA, 211 bp, Homo sapiens
  misc_feature 1..211: note = U/M: U (0.22:0.87) in Breast Basal + Luminal Epithelium
  misc_feature 1..211: note = source = chr1:5897580-5897790; Gene: MIR4689 (Intergenic)
  source 1..211: mol_type = genomic DNA
cggtgaaagcactgtctcgcatccttcctaggctggagggctcaaatgttccttctattatgaaatgatgatgcagatggagtagtttgggtttggaaggaattcttttaatgcccttacttggccaataaaaagctggcaattcaggccgggagcggtggctcacgcctgtaatcccaacactttgggaggccgaggcggggggatcacg

SEQ ID NO: 6135 - DNA, 218 bp, Homo sapiens
  misc_feature 1..218: note = U/M: U (0.16:0.81) in Breast Basal + Luminal Epithelium
  misc_feature 1..218: note = source = chr19:13363864-13364081; Gene: CACNA1A,CACNA1A (exon,intron)
  source 1..218: mol_type = genomic DNA
cgatgttgaacacccgcagggcattttcataagcaacagaagccccatagaactaggggaaagaagcaggagtagcaggggtcagcgagcaggggtgggaagtgggaagtggggaggcagcttcatggctgttctccaggcaacactccagccccaggcaaggtctgagcaacctcactggtaggaggcacagttcaggaaagccccgctctccgccg

SEQ ID NO: 6136 - DNA, 257 bp, Homo sapiens
  misc_feature 1..257: note = U/M: U (0.25:0.9) in Breast Basal + Luminal Epithelium
  misc_feature 1..257: note = source = chr4:6973417-6973673; Gene: TBC1D14 (intron)
  source 1..257: mol_type = genomic DNA
cgggcatttgctagaaatgcacgttctcgggccttactccagacacatcaaaccaagttctggggctggggcccaacaagttttgttttaacagaagctacaggtcattctaatgcatgccaaaatttaagaactatcggtatgcaggaagagaatgttagctattggaaggaaaatagccatctttgccacagcaggttaaataaagggcccaaagcccaccggccaggcaaatttcagtaactgctggtgaaccg

SEQ ID NO: 6137 - DNA, 279 bp, Homo sapiens
  misc_feature 1..279: note = U/M: U (0.16:0.81) in Breast Basal + Luminal Epithelium
  misc_feature 1..279: note = source = chr12:118210555-118210833; Gene: KSR2 (intron)
  source 1..279: mol_type = genomic DNA
cgcacacacacacataccattccaccaaagacgcacaagcacacactgacacaacacaccattccaccggggccacgggaacatcgactcgccctcaagtttactttctttccttgaagtttgttcaaagtctgagagagaagcagagaggaagaaaagtcttaccctctgccaaattatctttcccatgaaattatcttcctctccacccctacacttcaaaactagaagtttggggctaaaaatgcaaaaagtctcatttcattatccaaattaccg

SEQ ID NO: 6138 - DNA, 93 bp, Homo sapiens
  misc_feature 1..93: note = U/M: U (0.16:0.79) in Breast Basal + Luminal Epithelium
  misc_feature 1..93: note = source = chr4:3739508-3739600; Gene: ADRA2C (Intergenic)
  source 1..93: mol_type = genomic DNA
cggccactcgtggagacgccaggctgtgggtttctcttccgttcaccgagagtccactcccattcctttccatggtccagaaactggttggcg

SEQ ID NO: 6139 - DNA, 120 bp, Homo sapiens
  misc_feature 1..120: note = U/M: U (0.22:0.85) in Breast Basal + Luminal Epithelium
  misc_feature 1..120: note = source = chr19:46968274-46968393; Gene: PNMAL1 (Intergenic)
  source 1..120: mol_type = genomic DNA
cgggccagcgcctccccagacgcacccctgaacagaacacctccacccggggcgatgaggtttctttgaagagagctttcatgtgccccaaccttggattccccccatttttagggcacg

SEQ ID NO: 6140 - DNA, 261 bp, Homo sapiens
  misc_feature 1..261: note = U/M: U (0.26:0.89) in Breast Basal + Luminal Epithelium
  misc_feature 1..261: note = source = chr16:3723608-3723868; Gene: TRAP1 (intron)
  source 1..261: mol_type = genomic DNA
cgcaggagccctgggtggggcctgagactctaacaagcccctggaggccacacctggctggctctttccaagatggatgccagctgtgcaggacattaggagagtttccaggcagccaaggacagaagagcctgggggcaggacgggctggctctcagccccgaataggtctccttacggcaggatttgcgggaacttcaatgtggtaaaggaaaccaggggaggtggagggtgtggaggaagcacacagagaggccaacg

SEQ ID NO: 6141 - DNA, 288 bp, Homo sapiens
  misc_feature 1..288: note = U/M: U (0.22:0.85) in Breast Basal + Luminal Epithelium
  misc_feature 1..288: note = source = chr10:121482062-121482349; Gene: INPP5F (Intergenic)
  source 1..288: mol_type = genomic DNA
cggccaccaccccgtctgggaggtgtgcccaacagctcattgagaacgggccaggatgacaatggcggctttgtggaatagaaggcgggaaaggtggggaaaagattgagaaatcggatggttgccgtgtctgtgtagaaagaagtagacatgggagacttttcattttgttctgcactaagaaaaattcttctgccttgggatcctgttgatctgtgaccttacccccaaccctgtgctctctgaaacatgtgctgtgtccactcagggttaaatggattaagggcg

SEQ ID NO: 6142 - DNA, 299 bp, Homo sapiens
  misc_feature 1..299: note = U/M: U (0.18:0.81) in Breast Basal + Luminal Epithelium
  misc_feature 1..299: note = source = chr10:130120579-130120877; Gene: MKI67 (Intergenic)
  source 1..299: mol_type = genomic DNA
cgaagcttccctgtccaacatagtgggcagaattctgggtggcagaaagttgcacagctgtgatcaatgtcaacgccgattgggtttggagccaagactgtagatgtcttctgaaatgcggttataaggtcctggagaggtcagaagcctttcgggttgtgccaggcagggaggataccagctccagacaccaatgacaacctccactctgcctccaaccagcccttggaaccttgggcaagtccttttgtgaactaaaggaattgggttggctagcttctaacgttctttccagagcg

SEQ ID NO: 6143 - DNA, 403 bp, Homo sapiens
  misc_feature 1..403: note = U/M: U (0.28:0.91) in Breast Basal + Luminal Epithelium
  misc_feature 1..403: note = source = chr13:95204863-95205265; Gene: TGDS (Intergenic)
  source 1..403: mol_type = genomic DNA
cgaagttgttggacataaatccttattaagttatttggacctgagtacttaataaaaggaattgttcggcatttcttttggcctgggggcattggaaaaaattactgagacagtaagagctgcctgtgaacagagaaagcgaaaaacaattattatgagtttgggaaaaaccttgctttactcagcaagattgcagcgcaaagaagaactgtcagaacatccaaggagaccaagcgccacaggctaaataaagtgaagtgaaaatctgtgcacacacatcatagtaagaagagacaggtgataaagaagttggcattcaaaatgaggataaagatgttgaagaagactctgtgttggaaagaaactgtgtaagctgcagtcctgttttccaaatgagctcgcg

SEQ ID NO: 6144 - DNA, 441 bp, Homo sapiens
  misc_feature 1..441: note = U/M: U (0.25:0.88) in Breast Basal + Luminal Epithelium
  misc_feature 1..441: note = source = chr12:123211652-123212092; Gene: HCAR1 (TTS)
  source 1..441: mol_type = genomic DNA
cgtctctataaaaaaaatttaaaaattagctgagtgtggtggcttatgcctgtactcccagctattcaggaggctgaggtgggaggaacacttgagcccaggagtttgaggctgcagtgagctatgatcatgccactcactgcactccagcctgggcaacagagcaagattcagtgtctaaaaacacaagctgccctaagatcacaggcctagtaaatgcttgagctgagattcaaacttcgatgcttctaatgctctatagctcgtacttttcatcactaggctgcacagtgcctctgaaaaaaggaataatagggacagcctagaggggtgttttgaggccaaagaactagaagttggcaaagttcttttttttttttgagacggcgtttcactcctgtggcccagtctggagtgcaatggcacgatgtcacctcaccg

SEQ ID NO: 6145 - DNA, 120 bp, Homo sapiens
  misc_feature 1..120: note = U/M: U (0.3:0.92) in Breast Basal + Luminal Epithelium
  misc_feature 1..120: note = source = chr10:132777726-132777845; Gene: MIR378C (Intergenic)
  source 1..120: mol_type = genomic DNA
cgcccaggctggagtgcagtggcgcgatctcgactcactgcaagctccacctcccgggttcacgccattctcctgcctcagcctcctgagtagctgggactacaggcgcccgccactgcg

SEQ ID NO: 6146 - DNA, 134 bp, Homo sapiens
  misc_feature 1..134: note = U/M: U (0.26:0.88) in Breast Basal + Luminal Epithelium
  misc_feature 1..134: note = source = chr9:137721879-137722012; Gene: COL5A1 (intron)
  source 1..134: mol_type = genomic DNA
cgtgggaaactggtaaggtggcctctggcgtctttgcggttgtcactttaaacccgcccatctcgtatcttacagagtaaaatggcccgctggcccaaagagcagccttccacctggtatagtcagtacaagcg

SEQ ID NO: 6147 - DNA, 197 bp, Homo sapiens
  misc_feature 1..197: note = U/M: U (0.17:0.79) in Breast Basal + Luminal Epithelium
  misc_feature 1..197: note = source = chr8:144318338-144318534; Gene: ZFP41 (Intergenic)
  source 1..197: mol_type = genomic DNA
cgtgggaacacagccatgggccatggtatttgctgtctgtccctctgccaggacagtccctctgctgtagacagcatggcatgcccaccatccctccttcaggcttccgaggaggcttccccgaggccatgctgcggtgcttgagggttgcaggaagcaaaaccgcgaatgaggggggctgctgctggtgtgaagcg

SEQ ID NO: 6148 - DNA, 205 bp, Homo sapiens
  misc_feature 1..205: note = U/M: U (0.18:0.8) in Breast Basal + Luminal Epithelium
  misc_feature 1..205: note = source = chr13:22199870-22200074; Gene: EFHA1 (Intergenic)
  source 1..205: mol_type = genomic DNA
cgcttcaaactatggacataaatgcccaaatatgtgaggtagtttggtcttttattgagaaaaatgaaagaaaaacaagctgtcttgggaaatgtctaaccagaaaatctatctgatttctcaaaataaattccgaagaacagaggacaccaacgattgtacctgtgtgtcgcactacaacactggcagaagtagaagctgcacg

SEQ ID NO: 6149 - DNA, 47 bp, Homo sapiens
  misc_feature 1..47: note = U/M: U (0.22:0.82) in Breast Basal + Luminal Epithelium
  misc_feature 1..47: note = source = chr10:134955754-134955800; Gene: KNDC1 (Intergenic)
  source 1..47: mol_type = genomic DNA
cggagtgtccgggtgctgagcacggccccttccctgtgatcggcgcg

SEQ ID NO: 6150 - DNA, 116 bp, Homo sapiens
  misc_feature 1..116: note = U/M: U (0.24:0.83) in Breast Basal + Luminal Epithelium
  misc_feature 1..116: note = source = chr5:177943384-177943499; Gene: COL23A1 (intron)
  source 1..116: mol_type = genomic DNA
cgctgcccgatgacggctctctgccagatctctctggttttaagttcacctctcctgaccacagtgtgaaaggacagaggctctgagcaccggtgtgcctcctcccctcctctccg

SEQ ID NO: 6151 - DNA, 121 bp, Homo sapiens
  misc_feature 1..121: note = U/M: U (0.24:0.83) in Breast Basal + Luminal Epithelium
  misc_feature 1..121: note = source = chr13:112298627-112298747; Gene: TEX29 (Intergenic)
  source 1..121: mol_type = genomic DNA
cgggatcagaatctccctcgcagaacaagaccgagacttaagtgagatgatgcccacggggctgatggcaggcgttccttccactgtgccagcgtctctgtcaggggcccactctgttacg

SEQ ID NO: 6152 - DNA, 146 bp, Homo sapiens
  misc_feature 1..146: note = U/M: U (0.22:0.81) in Breast Basal + Luminal Epithelium
  misc_feature 1..146: note = source = chr12:124362406-124362551; Gene: DNAH10 (intron)
  source 1..146: mol_type = genomic DNA
cgagatctctcacgggtttttaatggtcttgtcctcactaacccggagcggtgagtttgatttatcttactaaaatatgccccacaggtatgatagttttcttattcttttaagacagagggcttatcagtggatttgatgaatcg

SEQ ID NO: 6153 - DNA, 272 bp, Homo sapiens
  misc_feature 1..272: note = U/M: U (0.24:0.81) in Breast Basal + Luminal Epithelium
  misc_feature 1..272: note = source = chr10:126955448-126955719; Gene: MIR4296 (Intergenic)
  source 1..272: mol_type = genomic DNA
cggaagggaagcaggatcccattgggctgtcagctgagtgtcaagacacctggcagagctggccctggggggacattgacatgtccttggctcctgcctgggttcatccttccactgagacgctgcgggcaaaactgcttcttgaggcttccaggcaagcctccctggcctgctgccactaccgagaagaataaaaaggtggacttcacaatggatccctttggtctggggtgctgtgtggagtgtgaagcccctggcagtgggtgctgacg

SEQ ID NO: 6154 - DNA, 423 bp, Homo sapiens
  misc_feature 1..423: note = U/M: U (0.26:0.83) in Breast Basal + Luminal Epithelium
  misc_feature 1..423: note = source = chr4:42110492-42110914; Gene: BEND4 (Intergenic)
  source 1..423: mol_type = genomic DNA
cgtctttttcattttagccatcctagtgaagtggcatctcattgcaatttgatttacataaccctagtgattaataatgttgagcatcttttcttgtgcgtattggccatttgcatatcttccttggggcatacacgctcagatcttttgcctgtttctaatggggctttttgttcttattgttgagtcgtaagttctatatactctggcatcagtctcttatcaggtatataatctgtaagtattttcttccattctgtgggttgtctttttcatttttcatggtgttctttgaagcatacaagtttttcattttgttgaaatccaattgatctatgtttttcttttgtcactaaagcgtttggtgtcatattgaagaaatcttgcctgagccaagatgaagacttactcctgtgtctaacg

SEQ ID NO: 6155 - DNA, 275 bp, Homo sapiens
  misc_feature 1..275: note = U/M: U (0.24:0.8) in Breast Basal + Luminal Epithelium
  misc_feature 1..275: note = source = chr16:1166174-1166448; Gene: C1QTNF8 (Intergenic)
  source 1..275: mol_type = genomic DNA
cggtggcttcccaagccccagggagccccccacaccatgtcctactccctacagcagtgactgccaactggggtgactctgcccccacaagggacatgtgggggtgtctgcagaggatctcagctgtcatgacgcgggggcgggggaagaggcactcctggtacctgatgggtagaagtcaggaatgcggcttagctgcctgccacagggcccaggactgccccaccatgggggtgagcagccggaatcccggcagtgcccaggtggggaggccg

SEQ ID NO: 6156 - DNA, 135 bp, Homo sapiens
  misc_feature 1..135: note = U/M: U (0.24:0.78) in Breast Basal + Luminal Epithelium
  misc_feature 1..135: note = source = chr8:142949835-142949969; Gene: MIR4472-1 (Intergenic)
  source 1..135: mol_type = genomic DNA
cggggacaagagccctggcgcctcccagcagtgcccgccggggacaagagccctggcgcctcccagcagtgcccgccgaggacaagagctgcccttcccacttctgctgcctttaaatatcacctaaggggaccg

SEQ ID NO: 6157 - DNA, 173 bp, Homo sapiens
  misc_feature 1..173: note = U/M: U (0.32:0.86) in Breast Basal + Luminal Epithelium
  misc_feature 1..173: note = source = chr20:61320511-61320683; Gene: NTSR1 (Intergenic)
  source 1..173: mol_type = genomic DNA
cgcgcctcgtaggcctgtccctggctgtgccccgcgcctcataggcttgtccctggctgtgccccgtgcctcgcaggcctgtccctggccggctgtgtcccgttcctcgcaggcctgtccccggctgtgccccgtgcctcgcaggcctgtccccggctgtgccccgtgcctcg

SEQ ID NO: 6158 - DNA, 152 bp, Homo sapiens
  misc_feature 1..152: note = U/M: U (0.26:0.79) in Breast Basal + Luminal Epithelium
  misc_feature 1..152: note = source = chr4:127123265-127123416; Gene: MIR2054 (Intergenic)
  source 1..152: mol_type = genomic DNA
cgggaatgtattactgcccacagctttgtgagccatccacgaatgcattatagccctttttgctcccactcacagctaggtgagccagccatgaaagtgttacagctcttttcacgcccactgtttggcaggtcccgagttcttgtaccacg

SEQ ID NO: 6159 - DNA, 119 bp, Homo sapiens
  misc_feature 1..119: note = U/M: U (0.32:0.84) in Breast Basal + Luminal Epithelium
  misc_feature 1..119: note = source = chr16:1164680-1164798; Gene: C1QTNF8 (Intergenic)
  source 1..119: mol_type = genomic DNA
cgctccacacccggggcctcaggccagccacccaccacgcatgggatgtggtttctggtgggaacagagacaggcaggtcccagcaccgctgtcctgcccaccccacaccctgtcatcg

SEQ ID NO: 6160 - DNA, 257 bp, Homo sapiens
  misc_feature 1..257: note = U/M: U (0.03:0.9) in Breast Basal + Luminal Epithelium
  misc_feature 1..257: note = source = chr7:37152662-37152918; Gene: ELMO1 (intron)
  source 1..257: mol_type = genomic DNA
cgatatagtttctaatttggttttcactccaggacggacaaaggccagaaaggcagctgcatccagagaggttagagcgtgttccagatagagatctacttctgtggtttccatccatggggtgaatcctgccaaaaggtggaacaccagaactctctgggcagagtcctgccactcactcaatccaggcatgcatttaacaaatatgtgctgactgtcttctgtgtgcctggcactgccccgggcactggggtacc

SEQ ID NO: 6161 - DNA, 267 bp, Homo sapiens
  misc_feature 1..267: note = U/M: U (0.26:0.88) in Breast Basal + Luminal Epithelium
  misc_feature 1..267: note = source = chr9:122025916-122026182; Gene: DBC1 (intron)
  source 1..267: mol_type = genomic DNA
cgctttgtcgcccaggctggagtgcagtggtgcgatctctgctcactgcaaactccgcctcctgggttcacgccattctcctgcctcagcctcccaagtagctgggactacaggtgcccactaccacgtctggctaatttttttgtatttttagtagagacggggtttcaccgtgttagccaggatggtctcgatctcctgaccttgtgatccgcccgcctcggcctcccaaagtgctgggattacaggcgtgagccacagcgcccg

SEQ ID NO: 6162 - DNA, 479 bp, Homo sapiens
  misc_feature 1..479: note = U/M: U (0.19:0.8) in Breast Basal + Luminal Epithelium
  misc_feature 1..479: note = source = chr10:8111648-8112126; Gene: GATA3 (intron)
  source 1..479: mol_type = genomic DNA
cgctcaccatgggggcagatgacaggttccaaataattgatgcaataggacctagcttggaaaactactttgtctagcatagccgtgctgaggccgagggggctcacagcctggcagccacacaacccccttggtatgcattggacactccacataccatgcagcaatccgatgtgctgagtgggcctgtgtggtttataaggaaaaaaaaaaaatcttccttttggaaaacaaaaaaagccaccggtcctattttgttgtttccttacattttaaactctttgcagaaagagagaatgaaagagaaaggtaaatagaattgtaatgtgtggcagggggtctggaaactaagaggacccatttggttactgagaggtaaaaagtcttggctaaatctgtgctacaaatttgaaatggatcctctgtataaaagacatggaaaaaaatgtctgacagatttcgtctgatgtctttgtccg

SEQ ID NO: 6163 - DNA, 237 bp, Homo sapiens
  misc_feature 1..237: note = U/M: U (0.03:0.92) in Breast Basal + Luminal Epithelium
  misc_feature 1..237: note = source = chr22:23801402-23801638; Gene: ZDHHC8P1 (Intergenic)
  source 1..237: mol_type = genomic DNA
cgctcagaccccctggctgcgcgcccgggcgtgtgctgggcccatggactctgcgttcagctctttgaggagccgccggctgtttgcagtggccgcatcacacacgctcccgccagcgacgcggagggtctgattcccctcgacccagcagctcatggtgtttgctctcagtggccgtcggcgcgaggcgggtccgtgtctcgctcagttgaggttcacgtttccccggtgcccggc

SEQ ID NO: 6164 - DNA, 225 bp, Homo sapiens
  misc_feature 1..225: note = U/M: U (0.06:0.89) in Breast Basal + Luminal Epithelium
  misc_feature 1..225: note = source = chr2:36668427-36668651; Gene: CRIM1 (exon)
  source 1..225: mol_type = genomic DNA
cgctgtgaagtccagttctctccacgttgtcctgaagattctgttctgatcgagggttatgctcctcctggggagtgctgtcccttacccagccgctgcgtgtgcaaccccgcaggctgtctgcgcaaagtctgccagccgggaaacctgaacatactagtgtcaaaagcctcagggaagccgggagagtgctgtgacctctatgagtgcaaaccaggtatgcac

SEQ ID NO: 6165 - DNA, 192 bp, Homo sapiens
  misc_feature 1..192: note = U/M: U (0.08:0.88) in Breast Basal + Luminal Epithelium
  misc_feature 1..192: note = source = chr1:228083415-228083606; Gene: MIR5008 (Intergenic)
  source 1..192: mol_type = genomic DNA
cggaagtgcaaaggtcagtcctggaggcggcgagttggcagtagcctgagggtaggacttgcgtctccctgtgtacctgccgcctccaagttcagatgcactggccgttctcgctggggccatgagccaggcagcacccggggcccggcaccccaggcctggactcctgggcctctgctcgctccagtttcc

SEQ ID NO: 6166 - DNA, 446 bp, Homo sapiens
  misc_feature 1..446: note = U/M: U (0.18:0.94) in Breast Basal + Luminal Epithelium
  misc_feature 1..446: note = source = chr11:232603-233048; Gene: SIRT3 (intron)
  source 1..446: mol_type = genomic DNA
cgttacattgctctctttgtgtgtgctcaaaaaaattccataatacacttcttaaaagagagaagaaaaaaagagatcatcacaccagattggcaaaacaatgtcaacttctgcccaaaatacacagctctgcaggtatgcaggagaacaagcagtggcctttaaacacccagaggacattttccttgggaacaaagccctaactagttggctcaaaaaaagtcccaaggaagaagcataagcgataggttttggccgtccccagaaacaggcacccgagcatcccctgtgagaaacaggcacccgagcctccctgggagaaacaggcacccgagcctccgtgggagaaaaagaatgtgtgcgactcacagagggctcacctctctcaagcccatcgatgttctgcgtgtagagccgcagaagcagccccttgtcatgaagcagcc

SEQ ID NO: 6167 - DNA, 184 bp, Homo sapiens
  misc_feature 1..184: note = U/M: U (0.19:0.94) in Breast Basal + Luminal Epithelium
  misc_feature 1..184: note = source = chr2:26524688-26524871; Gene: EPT1 (Intergenic)
  source 1..184: mol_type = genomic DNA
cgaaagggaatggcagtcggagtcgtaactcagctgggctcttagcatcggccggtaacacacttatccaagagactggacttggtggccttaggttggccccactgcctcagggcgttggcagctactgcaatccttctaaaagatgccaacaagctagccctaggtcagaagttaatagttc

SEQ ID NO: 6168 - DNA, 259 bp, Homo sapiens
  misc_feature 1..259: note = U/M: U (0.14:0.89) in Breast Basal + Luminal Epithelium
  misc_feature 1..259: note = source = chr11:233160-233418; Gene: SIRT3 (intron)
  source 1..259: mol_type = genomic DNA
cggggtacgggagatcgtactgctggaggttgctgtacaggccactccccggcgatctgcagggagagaagaaaggctctgaggcctttggaagaggacagggaagtggaataaactgggcagtggggagggcaggagtcaggggaggggagcgcagaaggcaggtgggactgtgggcagtacctgaagtctggaatgccactgggtgtgctgatgccggcccccaccatgaccaccaccctctggcaggctctggccc

SEQ ID NO: 6169 - DNA, 278 bp, Homo sapiens
  misc_feature 1..278: note = U/M: U (0.11:0.83) in Breast Basal + Luminal Epithelium
  misc_feature 1..278: note = source = chr16:4787695-4787972; Gene: C16orf71 (exon,intron)
  source 1..278: mol_type = genomic DNA
cgggctgggctggaagtgagagtggagagtggagagcgggggtggctaggccctcagggctctgcctgctgccttgtcctccaaaagccctctcatttgtccacagtcggactatggggaagaggagctgttcatcttccagcgaaaccaaacctccctgattccagacctgtcggaggagctggctgaagatcctgccgatggcgacaagtccagggcctgggtcgctgcagctgaagagtcccttcccgaggtctgtgggacacagaagagtatac

SEQ ID NO: 6170 - DNA, 94 bp, Homo sapiens
  misc_feature 1..94: note = U/M: U (0.22:0.91) in Breast Basal + Luminal Epithelium
  misc_feature 1..94: note = source = chr2:242757513-242757606; Gene: NEU4 (exon)
  source 1..94: mol_type = genomic DNA
cgccttctacagcgatgaccacggccgcacctggcgctgtggaggcctcgtgcccaacctgcgctcaggcgagtgccagctggcggcggtggac

SEQ ID NO: 6171 - DNA, 130 bp, Homo sapiens
  misc_feature 1..130: note = U/M: U (0.27:0.94) in Breast Basal + Luminal Epithelium
  misc_feature 1..130: note = source = chr5:159776351-159776480; Gene: C1QTNF2 (exon)
  source 1..130: mol_type = genomic DNA
cggtgttggcatcaaaggtccggatgcggtactggccgttgtgcaccaggccgatggccaggtgcttgttggccagcgtgatgtcgtaggtgaagtagtagatcccaggcacgccgcagacgaacttgcc

SEQ ID NO: 6172 - DNA, 441 bp, Homo sapiens
  misc_feature 1..441: note = U/M: U (0.09:0.88) in Breast Basal + Luminal Epithelium
  misc_feature 1..441: note = source = chr12:4737521-4737961; Gene: AKAP3 (exon)
  source 1..441: mol_type = genomic DNA
cggtctcattcacaagctctgatgctatcttactgaggcttttggtgggtgtgggttcattccccatgtacaatgactgatagacacatttgttttcagagccatcgatcttctcattgatctctttgcgggccatggctatgactagattcgtgaggcggttagcatagaaggaaacttcatctactgaactcccgttgccaagttgggccctggggccctggcaaggaatctctttgtgagtcatctcaaaatgcaatctttctggagtgcccttggtggtggtgttgtaatagtctacagagaaacctttgtgtgggtctcctgagttggacgtttccccaccaaatgattctccgggtttgaaccgaacatcttggaactctgctgtactcttctccaggtctctgcggagccagctgagcactctgacaggatccg

SEQ ID NO: 6173 - DNA, 66 bp, Homo sapiens
  misc_feature 1..66: note = U/M: U (0.16:0.92) in Breast Basal + Luminal Epithelium
  misc_feature 1..66: note = source = chr14:41613620-41613685; Gene: LRFN5 (Intergenic)
  source 1..66: mol_type = genomic DNA
cgcttcaccagccagaaacctctgtggccggcggctcctttggcccgagtaatactcatgcccgcg

SEQ ID NO: 6174 - DNA, 315 bp, Homo sapiens
  misc_feature 1..315: note = U/M: U (0.06:0.82) in Breast Basal + Luminal Epithelium
  misc_feature 1..315: note = source = chr9:78432781-78433095; Gene: PCSK5 (Intergenic)
  source 1..315: mol_type = genomic DNA
cggtatgatattgcctgtgggattgtcataaatagctcttattatttggagatacattccatcaatacctagtttattgcgagtttttagcatgaaggggtgttgaattttattgaaggcttttctgcatttattgagataatcatgtggtttttgtcattggtccagtttatgtgatggattatgtttattgatttgcatatgttgaaccagccttggatcccagggatgaagccaacttgatcgtggtggataaactttttaatgtgcttcttgattcggtttgccagtatgttattaaggatttttgcatcg

SEQ ID NO: 6175 - DNA, 405 bp, Homo sapiens
  misc_feature 1..405: note = U/M: U (0.14:0.9) in Breast Basal + Luminal Epithelium
  misc_feature 1..405: note = source = chr17:2278727-2279131; Gene: SGSM2,SGSM2 (exon,intron)
  source 1..405: mol_type = genomic DNA
cggtgggctgcgggaaggtgctggagtgcaggtggagccgccctgtgttcaccccccaggtgtttatctcagtggatgatctggaacccccggagccccaggaccctgaagattccagaccaaaacctgagcaggaagcaggacccgggactccgggcaccgccgtggtggagcagcagcattccgtggagttcgactctccagactcaggactgccctcctctcgcaattactccgtggcctcgggcatccagtcaagcctagatgaggggcagagcgtgggcttcgaagaggaggacggcggtggggaggaaggctccagtgggcccggccctgcagctcacactttgagggagccccaggatcccagccaggagaagcctcaggccggagaactggaggccg

SEQ ID NO: 6176 - DNA, 300 bp, Homo sapiens
  misc_feature 1..300: note = U/M: U (0.12:0.86) in Breast Basal + Luminal Epithelium
  misc_feature 1..300: note = source = chr5:5571530-5571829; Gene: KIAA0947 (Intergenic)
  source 1..300: mol_type = genomic DNA
cgcacatcaggaaataggacagcctcattggcttttgctcagcttccagggagaaatcgtcaaccacagtagcctgcaggagagatggagctacaacccagcattggaaaataaaagcccaggaacctggcaggagtggaggccagcgcgttggagagccccgggccataggagacaagccattccctgtctcggatggaatcccttctgcctgtgtccctcagcactcctggtttgtgttgggtgaatgaaaccacatgtgtggagtacttttttttttttttttttttttttgagacg

SEQ ID NO: 6177 - DNA, 54 bp, Homo sapiens; identical to SEQ ID NO: 2774
  misc_feature 1..54: note = U/M: U (0.17:0.89) in Breast Basal + Luminal Epithelium
  misc_feature 1..54: note = source = chr5:177525862-177525915; Gene: N4BP3 (Intergenic)
  source 1..54: mol_type = genomic DNA

SEQ ID NO: 6178 - DNA, 113 bp, Homo sapiens
  misc_feature 1..113: note = U/M: U (0.18:0.9) in Breast Basal + Luminal Epithelium
  misc_feature 1..113: note = source = chr20:62011905-62012017; Gene: CHRNA4 (Intergenic)
  source 1..113: mol_type = genomic DNA
cgccagcctcacagggagccggcatgtggagctgtcctccctgccgcagccggcatgcctggctgtgcatagtgcctggaccccacgctcactcgctcacacaccgctctgcg

SEQ ID NO: 6179 - DNA, 386 bp, Homo sapiens
  misc_feature 1..386: note = U/M: U (0.16:0.87) in Breast Basal + Luminal Epithelium
  misc_feature 1..386: note = source = chr14:28626361-28626746; Gene: LINC00645 (Intergenic)
  source 1..386: mol_type = genomic DNA
cgagactgaagcatggaataattaaagtaagataacatgtttatcaaagtttccctagagagaatctaggggagaagatctgaagaggcattggtgggggaaataaattttatgttgcatagacaaaataagatcataatgtcatgggaggcttggggtgttgctttgacagcctgaaacctctgtggccagtggcaccttctgcctgagtgttgcttgcgaccccgggcttgttccgcccactcggcccagcacgccatgctcagctcacactactggcccagatcccacacctgccgagggcgagccaagtgcacagtgacaaggggtgtgtgggcgagcgagtgcacagtccaaccagtgtgcacagccaggcacactggccg

SEQ ID NO: 6180 - DNA, 65 bp, Homo sapiens
  misc_feature 1..65: note = U/M: U (0.14:0.84) in Breast Basal + Luminal Epithelium
  misc_feature 1..65: note = source = chr2:242757430-242757494; Gene: NEU4 (exon)
  source 1..65: mol_type = genomic DNA
cgcctgctggtacccgcctacacctaccgcgtggaccgccgagagtgttttggcaagatctgccg

SEQ ID NO: 6181 - DNA, 93 bp, Homo sapiens
  misc_feature 1..93: note = U/M: U (0.14:0.84) in Breast Basal + Luminal Epithelium
  misc_feature 1..93: note = source = chr9:126154260-126154352; Gene: DENND1A (intron)
  source 1..93: mol_type = genomic DNA
cggctgctcccgcctctgcccaccttgtctccgcgtggagttcccatgcagatgacttcccgaaccccttctaatgtttggtttaacgtgtcg

SEQ ID NO: 6182 - DNA, 265 bp, Homo sapiens
  misc_feature 1..265: note = U/M: U (0.24:0.94) in Breast Basal + Luminal Epithelium
  misc_feature 1..265: note = source = chr2:44497562-44497826; Gene: SLC3A1 (Intergenic)
  source 1..265: mol_type = genomic DNA
cggtagagggacgtgactgcaaattgtccaggttcttggcgttttgaacaaagaattggacaaaacacgcagcaaagaaagaatgaagcaacaaaagaacgaaagcagctctctcggctttcggctcggaggaggccaaggtgcaactttcttcggtcgtctcgaatccgggttcatccgacaccagccgcctccaccatgccgccgaagttccaccccaatgagatcaaagtcgtatacttcacgtgcactggagttgaagtcg

SEQ ID NO: 6183 - DNA, 288 bp, Homo sapiens; identical to SEQ ID NO: 2773
  misc_feature 1..288: note = U/M: U (0.19:0.89) in Breast Basal + Luminal Epithelium
  misc_feature 1..288: note = source = chr6:169641078-169641365; Gene: THBS2 (intron)
  source 1..288: mol_type = genomic DNA

SEQ ID NO: 6184 - DNA, 398 bp, Homo sapiens
  misc_feature 1..398: note = U/M: U (0.2:0.9) in Breast Basal + Luminal Epithelium
  misc_feature 1..398: note = source = chr9:126154361-126154758; Gene: DENND1A (intron)
  source 1..398: mol_type = genomic DNA
cgcgcgcgtgtgacagtggtgacaggcgaggctgttcctttttaaataccatgtcagagacacggcgtcaggaagcagggacgtgctccatgctctctgccgcgccgggatcgcaccggcttattttttaatgaggaagatctgcatctcgggagtttttttcatgtgtcacatcgcgtggacaaatcagcagcacgtcacgctggcccaaaatgaaatgctgacaaatgtagatatttcaaatttaattgacatttaaatgtacttgagataaagacggggaaaaatcagccaggacttggtctccggaggtggtgaaggggagctggtgatcatttttgaaaggatcacttcactcaggcacaaaggatcctcgctttgtaaatgtcttggctacg

SEQ ID NO: 6185 - DNA, 98 bp, Homo sapiens
  misc_feature 1..98: note = U/M: U (0.22:0.89) in Breast Basal + Luminal Epithelium
  misc_feature 1..98: note = source = chr21:46886593-46886690; Gene: COL18A1 (intron)
  source 1..98: mol_type = genomic DNA
cgggacagctttggaaagggcgttgctgtcactggggtccctggggccgccggtgtagcgtgctggtaccctccagcccaggaaggtggcagctgccg

SEQ ID NO: 6186 - DNA, 250 bp, Homo sapiens
  misc_feature 1..250: note = U/M: U (0.15:0.82) in Breast Basal + Luminal Epithelium
  misc_feature 1..250: note = source = chr14:41888904-41889153; Gene: LRFN5 (Intergenic)
  source 1..250: mol_type = genomic DNA
cggattcacttacccttgcctgcctgtagtttagattactgcatgaacttccaattctaccacaagcagaagtttctatggcaattataattctttctgaggacaagaacactgaggtcacatcacatcagtactttctgccctgtactgataccgatcaaattctgaaaataatttaaggtttcggtccttagccttagggcacaaaactcgatagaatctagcaatttcagaaaccttatcatgttcg

SEQ ID NO: 6187 - DNA, 117 bp, Homo sapiens
  misc_feature 1..117: note = U/M: U (0.11:0.77) in Breast Basal + Luminal Epithelium
  misc_feature 1..117: note = source = chr8:144209496-144209612; Gene: LY6H (Intergenic)
  source 1..117: mol_type = genomic DNA
cggcagagcaggctgcctggcccggactcttcccatgccgggggcccttctgctgtttgtaaatcagcttccccacgccacacaggtggaggcaggacaggcaacctccctaatgcg

SEQ ID NO: 6188 - DNA, 162 bp, Homo sapiens
  misc_feature 1..162: note = U/M: U (0.24:0.89) in Breast Basal + Luminal Epithelium
  misc_feature 1..162: note = source = chr3:185565216-185565377; Gene: IGF2BP2 (Intergenic)
  source 1..162: mol_type = genomic DNA
cggggtttcactgtgttagccaggatggtctacgatctcctgacctcgtgatccacccacctcagcctcccaaagtgttgggattacaggcgtgagccatggcgcccggcctctcacttctttaccctatggccttggggtaatttgtttaatctctgtgcg

SEQ ID NO: 6189 - DNA, 81 bp, Homo sapiens
  misc_feature 1..81: note = U/M: U (0.26:0.89) in Breast Basal + Luminal Epithelium
  misc_feature 1..81: note = source = chr22:34573021-34573101; Gene: LARGE (Intergenic)
  source 1..81: mol_type = genomic DNA
cgcttgaacccaggaggcagatgttgtggtgagctgagatcgcgccactgcattccaacctgcccacagagcgagactccg

SEQ ID NO: 6190 - DNA, 260 bp, Homo sapiens
  misc_feature 1..260: note = U/M: U (0.25:0.87) in Breast Basal + Luminal Epithelium
  misc_feature 1..260: note = source = chr20:31144203-31144462; Gene: C20orf112 (intron)
  source 1..260: mol_type = genomic DNA
cgtcctctgctacttgtctctgtccctccttgaaccctgttcttcctgatcccccattccagccctgcccaaatcctgccagctattaagggctacactccaaatttcccttctccaaaagctcatccccgggggcccagagactagaagcggaggctcagaaagggagagagagtggcccaaagtcacacagccgagcagaggctggtccatctgtgaatctcaactctggcctggtcccatctccaggcatatcagcg

SEQ ID NO: 6191 - DNA, 446 bp, Homo sapiens
  misc_feature 1..446: note = U/M: U (0.26:0.88) in Breast Basal + Luminal Epithelium
  misc_feature 1..446: note = source = chr1:6133736-6134181; Gene: KCNAB2 (intron)
  source 1..446: mol_type = genomic DNA
cgggataatctggcttcctgccaggttcctaacttgagcccctgtgtctccttccaggaacatgggtgaccttcggaggccagatcaccgatgaggtaagatggggctctcccagcaccccagaacccagcacgggctcgccagagcacatggttaagtctgccgcgtggaccagtgagcacgtgctcccgggagccagcgcagcagcctccctccctctttctgttttgtgagggcgccctgccccaggggagagtagaaaggtgagccaggtggccatggccagaggggatgccgagtctggtgccatcacccagcagtggatgcctcgggcctcagcatgtcccttaagctccccaggactcagatttcccacacgcgtgacccccattccacagttaacgaggagaattcagggtgcacacgcttcccaaattctgaagccg

SEQ ID NO: 6192 - DNA, 423 bp, Homo sapiens
  misc_feature 1..423: note = U/M: U (0.28:0.89) in Breast Basal + Luminal Epithelium
  misc_feature 1..423: note = source = chr12:124788301-124788723; Gene: FAM101A (intron)
  source 1..423: mol_type = genomic DNA
cgagggcagacgagggcatctcaccggattctgtctagaccagaacaggagcccgggcctgtgggagggcgctgcagcctcacagaccggctgggggtgggggtggggagcgggcctgtctgggggcttcccgtgcccaaggtggccgcatggccagggcaggtgagcaatgacaggtccccgtgtgcatgtgcctgaccccttccctggccctcccctgccttgccagcccccgtgggactgtgtgtgacccagtcttcggcagtatctcgctcccgcgtggctggaaagtcggacttcagggccgcagtctgccttcttggccgcgagaggcacttcccttgcccactccccaggctggctggagtccacagggcgccacgaccgtttcgatgttcgaatagccctgcagccagaaagacg

SEQ ID NO: 6193 - DNA, 162 bp, Homo sapiens
  misc_feature 1..162: note = U/M: U (0.23:0.83) in Breast Basal + Luminal Epithelium
  misc_feature 1..162: note = source = chr8:143334441-143334602; Gene: TSNARE1 (intron)
  source 1..162: mol_type = genomic DNA
cgggtgcagtatctgggatagagaccggacgggcagcctggcaaggagactgggctctgccacgggtgagagtgcggaggtggacaggctggcgacagcccaggctggcactacgggtacgggaggagggccggtagccgtggagtcacagcagtggtgacg

SEQ ID NO: 6194 - DNA, 180 bp, Homo sapiens
  misc_feature 1..180: note = U/M: U (0.3:0.9) in Breast Basal + Luminal Epithelium
  misc_feature 1..180: note = source = chr1:2811624-2811803; Gene: TTC34 (Intergenic)
  source 1..180: mol_type = genomic DNA
cgcccgcggctgtgtggtacactccgcgctgctcctcggctcctgggagtgctgcccagtctctggctccggcttcaccgggcatctctctgcctgtgtatctgtgtccacgctctccctttgtgtaaggacacccctcatggtggatgaggggccccccactccagtgtggcctcaccg

SEQ ID NO: 6195 - DNA, 309 bp, Homo sapiens
  misc_feature 1..309: note = U/M: U (0.32:0.92) in Breast Basal + Luminal Epithelium
  misc_feature 1..309: note = source = chr7:502956-503264; Gene: PDGFA (Intergenic)
  source 1..309: mol_type = genomic DNA
cgctgggacccagcctccggggagccgtgaagccctgccgtcttgtggctccaaagccggtccaccaatgacctcgtgccagcggcatcacgacgctgcctcacaccgcacaagactcgccgggaagatgcgagacccatgacagagcccagaaaggcgacggggtggcccaaggtcacacccacgccaggcccagcactctgctcttcccgctcacccactcggccgggcctgtgccctcccgcccggccaagtgggggctccaggaagggcagcgagtgccccgcggccccggccccactgcgggcg

SEQ ID NO: 6196 - DNA, 116 bp, Homo sapiens
  misc_feature 1..116: note = U/M: U (0.28:0.87) in Breast Basal + Luminal Epithelium
  misc_feature 1..116: note = source = chr22:49580759-49580874; Gene: LOC100128946 (Intergenic)
  source 1..116: mol_type = genomic DNA
cgctgtgcagaggtagagggccggtttcaggatgaggaagccctcttggaagcaccgtcctccgctaacagcctccaacctctgtccccagggagaggcgcgtccccagcgagtcg

SEQ ID NO: 6197 - DNA, 345 bp, Homo sapiens
  misc_feature 1..345: note = U/M: U (0.24:0.83) in Breast Basal + Luminal Epithelium
  misc_feature 1..345: note = source = chr20:19407815-19408159; Gene: SLC24A3 (intron)
  source 1..345: mol_type = genomic DNA
cgtggagtttgggaagcagatgcccaggaagcctggaacaccaggtgaggtggggctggcagcagtgagacaccggcatgaaaaaagcagcaaaagccatgatcgtggatgagatcagtacacacatcatagtgtccccagactcggacacacagggaaaatggtgcatctgctttacttttgtcgggtgaacaagtgaactcattgctttaaatttcaaggtatttcatctgaagaggcatctggaggctgaaaaaaatatattgagcatattatgtaaaaatgtaaatactgtttagaaagaaatcgattttatgtttcttgacttttcaaataccatttgcg

SEQ ID NO: 6198 - DNA, 44 bp, Homo sapiens
  misc_feature 1..44: note = U/M: U (0.31:0.88) in Breast Basal + Luminal Epithelium
  misc_feature 1..44: note = source = chr10:134795381-134795424; Gene: LOC399829 (Intergenic)
  source 1..44: mol_type = genomic DNA
cgcgtctggctggtggcagccgtcagggctttgtcaaagcggcg

SEQ ID NO: 6199 - DNA, 108 bp, Homo sapiens
  misc_feature 1..108: note = U/M: U (0.3:0.87) in Breast Basal + Luminal Epithelium
  misc_feature 1..108: note = source = chr8:58105962-58106069; Gene: LOC100507651 (Intergenic)
  source 1..108: mol_type = genomic DNA
cgggccctggggcaggcctggcccagcgctccgttcttgggagccctgccagcccacaggcccatctgcggcaggcacgtggtgccgcgagaacttggctcagggacg

SEQ ID NO: 6200 - DNA, 76 bp, Homo sapiens
  misc_feature 1..76: note = U/M: U (0.23:0.78) in Breast Basal + Luminal Epithelium
  misc_feature 1..76: note = source = chr22:17337857-17337932; Gene: HSFY1P1 (Intergenic)
  source 1..76: mol_type = genomic DNA
cggctgggaaaggagcgacctgcaaggctgctttaaacacccttcggcgtggcctgaagacaaaggcgcgcccacg

SEQ ID NO: 6201 - DNA, 140 bp, Homo sapiens
  misc_feature 1..140: note = U/M: U (0.25:0.76) in Breast Basal + Luminal Epithelium
  misc_feature 1..140: note = source = chr2:241074519-241074658; Gene: MYEOV2 (intron)
  source 1..140: mol_type = genomic DNA
cgatctgggtagggagagagtccctacccactgtctcccctctctctggcactgcacgctcaaccatgttaaacgacacaacattcccttcccttggtgagccagtcggcatcccccaacccagggctctgctcctgccg

SEQ ID NO: 6202 - DNA, 138 bp, Homo sapiens; identical to SEQ ID NO: 2803
  misc_feature 1..138: note = U/M: M (0.86:0.1) in Breast Basal + Luminal Epithelium
  misc_feature 1..138: note = source = chr12:54433551-54433688; Gene: HOXC4 (intron)
  source 1..138: mol_type = genomic DNA

SEQ ID NO: 6203 - DNA, 187 bp, Homo sapiens; identical to SEQ ID NO: 2804
  misc_feature 1..187: note = U/M: M (0.9:0.18) in Breast Basal + Luminal Epithelium
  misc_feature 1..187: note = source = chr3:180462104-180462290; Gene: CCDC39 (Intergenic)
  source 1..187: mol_type = genomic DNA

SEQ ID NO: 6204 - DNA, 51 bp, Homo sapiens
  misc_feature 1..51: note = U/M: M (0.64:0.09) in Breast Basal + Luminal Epithelium
  misc_feature 1..51: note = source = chr7:87935935-87935985; Gene: STEAP4 (intron)
  source 1..51: mol_type = genomic DNA
cgcggagcagcctcaggtgactttcctctaaagtgatgccggggcgcggcg

SEQ ID NO: 6205 - DNA, 159 bp, Homo sapiens
  misc_feature 1..159: note = U/M: M (0.68:0.13) in Breast Basal + Luminal Epithelium
  misc_feature 1..159: note = source = chr19:46580060-46580218; Gene: IGFL4 (Intergenic)
  source 1..159: mol_type = genomic DNA
cgtttcactctatctttcctggctgcccggcacttctacctatgcgtcttccctgttcactgacctagcttctgttcttttggtgctggaagcacaaagagggtgtgagattcctaacgttattgtgattatccatgggcttttcaaatatgtaaagcg

SEQ ID NO: 6206 - DNA, 363 bp, Homo sapiens
  misc_feature 1..363: note = U/M: M (0.83:0.29) in Breast Basal + Luminal Epithelium
  misc_feature 1..363: note = source = chrX:103812854-103813216; Gene: IL1RAPL2 (intron)
  source 1..363: mol_type = genomic DNA
cgaatgtgtagacctccaagaaggaatcctcctttcttttcctggccaggggaatcaagctgtagattattaaacatgcggcatagctgggaacagaccccaaggaagtaagggagggagggaggaaaggacacttctctgagcctgcaagttcagcacgggcgtcctacagttcaggaagactacctcagtgacagagtccctgggaatgaaggagttaagtttttgggacaagtgtctgggactggggtccattttcccactgacatcctcatctcccaccccaccgcagcagccgacccaaggttttggcttcatctctgagccgacccgtacggtgtgaactctctaatttgcgggccg

SEQ ID NO: 6207 - DNA, 83 bp, Homo sapiens; identical to SEQ ID NO: 2817
  misc_feature 1..83: note = U/M: M (0.92:0.1) in Breast Basal + Luminal Epithelium
  misc_feature 1..83: note = source = chr11:61062962-61063044; Gene: VWCE (promoter-TSS)
  source 1..83: mol_type = genomic DNA

SEQ ID NO: 6208 - DNA, 420 bp, Homo sapiens
  misc_feature 1..420: note = U/M: M (0.88:0.09) in Breast Basal + Luminal Epithelium
  misc_feature 1..420: note = source = chr5:1875521-1875940; Gene: IRX4 (Intergenic)
  source 1..420: mol_type = genomic DNA
cgcccagcgaggggatgccatttcctgcgcgtccccttagaatgtggctgaatccgcctccccacccgacgtctttatttaacacaatctcgcagcttattcaaataagccagctttgtcagccagttccaccaagatccgggggctccagcgagatggaattcctatggccagggccacggggaggggctggggtcccgagggcagcaagcttggctggcggcaggagccctgggtcctccccaggagagggacccagagcccagaccaagtccaacccgccaacctgcgccacccatgcgcgcactgggggctgcagagccccgccaggctgcccgcggccgggagcgtaaggccggggtccacgcctcgattttcagtgtccgcagcccctaccccgcctatctgcgacgcaaggcg

SEQ ID NO: 6209 - DNA, 70 bp, Homo sapiens
  misc_feature 1..70: note = U/M: M (0.93:0.18) in Breast Basal + Luminal Epithelium
  misc_feature 1..70: note = source = chr2:133428731-133428800; Gene: LYPD1 (promoter-TSS)
  source 1..70: mol_type = genomic DNA
cgcaaagtccaagtgacccaccttgcggactcccggggatgccccggtgctatcttcgccttccttcccg

SEQ ID NO: 6210 - DNA, 322 bp, Homo sapiens
  misc_feature 1..322: note = U/M: M (0.82:0.08) in Breast Basal + Luminal Epithelium
  misc_feature 1..322: note = source = chr12:16757947-16758268; Gene: LMO3,LMO3 (exon,promoter-TSS)
  source 1..322: mol_type = genomic DNA
cgaggaccgactattgtgaagccactttgggagcgggtcggagtggcggcagggggtgggggaagggatgaggacggccagacaagacagggcgcacacacggagcccctcgcagtgtgcaaaatgatggcgaatgacaaagccacatgcttccctaactctgcccgtaatcctaaaatcccagcggccccttttagcttcctggtaacaaatggatttgattaaactgtcacatgcagcgttagcatagcatatcatgttcaatatgaaaaagatcataaatctgacttgtatttcataacagcaatctgagtagtccccg

SEQ ID NO: 6211 - DNA, 328 bp, Homo sapiens
  misc_feature 1..328: note = U/M: M (0.8:0.06) in Breast Basal + Luminal Epithelium
  misc_feature 1..328: note = source = chr3:9904307-9904634; Gene: CIDEC (Intergenic)
  source 1..328: mol_type = genomic DNA
cgggtggctcaggggagtgactccccggcttggtcggcgctttgaggccccggggacccagcggagagggctcgggtgaggcatctggaggcgctgaatggggccgggagccgcgggacccgcagagggcgcctgtccgtgtgggcgcagcagcgcctagagggaggcggccccggcagcccgcaggggtcaggctctgctggagcaggggcgtccctgtctccgcttcccagcgcaggctgggtggggccgatggccattaaagccccgccccccgcggctcaccgccgcctggccccgtccccgaggccagaaaagaggagacccg

SEQ ID NO: 6212 - DNA, 52 bp, Homo sapiens; identical to SEQ ID NO: 2819
  misc_feature 1..52: note = U/M: M (0.82:0.09) in Breast Basal + Luminal Epithelium
  misc_feature 1..52: note = source = chr12:54408233-54408284; Gene: HOXC6 (Intergenic)
  source 1..52: mol_type = genomic DNA

SEQ ID NO: 6213 - DNA, 109 bp, Homo sapiens
  misc_feature 1..109: note = U/M: M (0.94:0.22) in Breast Basal + Luminal Epithelium
  misc_feature 1..109: note = source = chr12:16757837-16757945; Gene: LMO3 (exon)
  source 1..109: mol_type = genomic DNA
cgtgtctgagttgcagcagcttcgcattgagcaccaaacccaaaggtagaagtagaagggggtctccttgatttcgcttaagtgtggacctggtgcgcagcctacaccg

SEQ ID NO: 6214 - DNA, 183 bp, Homo sapiens
  misc_feature 1..183: note = U/M: M (0.8:0.1) in Breast Basal + Luminal Epithelium
  misc_feature 1..183: note = source = chr4:102712216-102712398; Gene: BANK1 (intron)
  source 1..183: mol_type = genomic DNA
cgtccctgagacagggcttctcctttttatcctgccgccaggcagcccagagggttcttctgtccctgacttctctgaggggcatctggacgccacgaggagggagcgcgctgggagttctggccagcgggctaccctcagtgtctgcaacttctgaggagctggaactttccccagcacccg

SEQ ID NO: 6215 - DNA, 252 bp, Homo sapiens
  misc_feature 1..252: note = U/M: M (0.72:0.02) in Breast Basal + Luminal Epithelium
  misc_feature 1..252: note = source = chr11:61062685-61062936; Gene: VWCE (promoter-TSS)
  source 1..252: mol_type = genomic DNA
cgcgaggggacgcggcggacgattgtggggagggtctctggcacctcgaagcgaaacacacaaaggcaacgccgcccgcctgctgatgcctctccgagaggcgcggagcccggggcgggggcaaagatcagggacccctgggggcggggtttcgccctcggcccacaccccctgccccggtttgggagtcggcttcctgcgaagcgctgactgaaggcgtcagaccgaggccccgggaggaaacagacttcg

SEQ ID NO: 6216 - DNA, 87 bp, Homo sapiens
  misc_feature 1..87: note = U/M: M (0.82:0.13) in Breast Basal + Luminal Epithelium
  misc_feature 1..87: note = source = chr10:98479658-98479744; Gene: PIK3AP1 (intron)
  source 1..87: mol_type = genomic DNA
cggggcttggggaactgtcccaagggcctccccggctgatctctccgcaccacctaggactgcctgagcgccccctgtgggtccacg

SEQ ID NO: 6217 - DNA, 143 bp, Homo sapiens
  misc_feature 1..143: note = U/M: M (0.8:0.11) in Breast Basal + Luminal Epithelium
  misc_feature 1..143: note = source = chr6:3053739-3053881; Gene: RIPK1 (Intergenic)
  source 1..143: mol_type = genomic DNA
cggggaggctgcaggagggaactgcctctcccaagtccctcggtctccggtaggagatcactcaccctccagccagcgccggccggggtaggagccgcaggtctgggaccagcgcctctgcgaggacagctctctgagttgcg

SEQ ID NO: 6218 - DNA, 403 bp, Homo sapiens
  misc_feature 1..403: note = U/M: M (0.74:0.05) in Breast Basal + Luminal Epithelium
  misc_feature 1..403: note = source = chr12:49390678-49391080; Gene: DDN (exon)
  source 1..403: mol_type = genomic DNA
cgggcagggtcctctcattccgccaggaggcgcccggggcttctgtgtcgcttccatcagaggagccgctatggacgctgagctcctcagcttcgtccgtgtccgagtcaggggctgtgtggcggcggatacgggacacggcttctcgcagggccccggcgtagggccctggggtccgcgcccagccccggccggcgcgccgctggaccaccgccacttccgacccctcggctctgccctgggctcccgaagctgctgggcctaaggcttggtgctctgggctacctggctgcgtgggggcgtcccgcaggtttacttcgggggccgggagccccaagatgcggaaagtgcgctcctccagtgtggagtcccccggcctcccgccctcagcttcgcccccgcg

SEQ ID NO: 6219 - DNA, 236 bp, Homo sapiens
  misc_feature 1..236: note = U/M: M (0.82:0.14) in Breast Basal + Luminal Epithelium
  misc_feature 1..236: note = source = chr18:12253405-12253640; Gene: CIDEA (promoter-TSS)
  source 1..236: mol_type = genomic DNA
cgctgtttccaggcggcagtcagcagttgggcacgagaggatatcctagcaagcctccatcccagaaagttacacctcttactgcccgagtcccacccctcaacactgagcccacctcttcagtcctgtagtgaggggttctgggaaccccttgtaactgcccgccttcctcggaggtctcagaggccctaattgcgtcttccgatgggaacaaccatgagagcagggtgtggacg

SEQ ID NO: 6220 - DNA, 287 bp, Homo sapiens
  misc_feature 1..287: note = U/M: M (0.74:0.06) in Breast Basal + Luminal Epithelium
  misc_feature 1..287: note = source = chr9:129373287-129373573; Gene: LMX1B (Intergenic)
  source 1..287: mol_type = genomic DNA
cgggacacgaggagtgaggacaaagggcaaggaacggggcctatagggagggtgtgtgtgtgtgtgtgtgtgtgtgtgtgtgtgtgtgtgtgtgtgtgtgtgtgtgtgtgtgtagggggaatgaatggacagcggggaaggcatgcagaggggcccaaggggtgtggactcagcagccccaccccagaccagagaaggcagccaggctctggcgtccaccgagccagcgcccctatctgggcgcgggccgcatggcggcagaccaccctatatccgccttggtggcg

SEQ ID NO: 6221 - DNA, 186 bp, Homo sapiens
  misc_feature 1..186: note = U/M: M (0.78:0.12) in Breast Basal + Luminal Epithelium
  misc_feature 1..186: note = source = chr11:17497362-17497547; Gene: ABCC8 (intron)
  source 1..186: mol_type = genomic DNA
cgttttggggatgcaggggacaccctatgagttgatagacttgactggtctggaagagtcaaggtcttggagagagatgggggggacctcagtggagaggcacgcacgattgtcccggccgtggcgcccaactttgcaagcaagggcgccggggtcgctgcgtcggcgagtcggagctactttgcg

SEQ ID NO: 6222 - DNA, 430 bp, Homo sapiens; identical to SEQ ID NO: 2818
  misc_feature 1..430: note = U/M: M (0.74:0.09) in Breast Basal + Luminal Epithelium
  misc_feature 1..430: note = source = chr6:50818692-50819121; Gene: TFAP2B (Intergenic)
  source 1..430: mol_type = genomic DNA

SEQ ID NO: 6223 - DNA, 377 bp, Homo sapiens
  misc_feature 1..377: note = U/M: M (0.68:0.04) in Breast Basal + Luminal Epithelium
  misc_feature 1..377: note = source = chr2:220378996-220379372; Gene: ASIC4 (exon)
  source 1..377: mol_type = genomic DNA
cgcccgtgctgccggtgaaacgctgttgacatgtcctgaattattaagcgtggggagggctccggagcacatgctgagcggagcggctggggctgcgcggcgtggcggagcagcgctcgctccctcgctcactcgctcgctcgcagggacacacgcaggggctgacagctgtgctggtgctgataagggaagccacaaggagacgatcgaggagagagacaagcggcagcagaggcagcagcggcagaggcagcaccagggctgcggagctgctgggagtgggagtgactcccccacctcgggcccccaccctgtccctgtcctcttcccgcttgccctgagtttagaagagcagccgctgccaccactgccactcg

SEQ ID NO: 6224 - DNA, 308 bp, Homo sapiens
  misc_feature 1..308: note = U/M: M (0.73:0.1) in Breast Basal + Luminal Epithelium
  misc_feature 1..308: note = source = chr18:56939245-56939552; Gene: RAX,RAX (intron,exon)
  source 1..308: mol_type = genomic DNA
cgatcactacctgcattccatttccactcagcaacccccaaccccttcctggctatgtctaatgagctgtcggcctcttcatcttgcaagtcattcccatcttctattttgagtttagaagagggaaacccccaaaggggagctcgtactacaaactggaacagactgcttgaagggcgatgcacagggaacatcgaagatctgtgcctctcccttgagactctgggcatgccaagtcgaggaaggacagtaataaatgcatggacacccgtgaattccgagaagcattggctgcaatttgggcctcg

SEQ ID NO: 6225 - DNA, 382 bp, Homo sapiens
  misc_feature 1..382: note = U/M: M (0.64:0.03) in Breast Basal + Luminal Epithelium
  misc_feature 1..382: note = source = chr3:16554239-16554620; Gene: RFTN1 (intron)
  source 1..382: mol_type = genomic DNA
cgtcccttgagtctagagaagtgggttaagacaagggaagaaaatcccttacagaagaggagatccccgttttcagtgctggggactctcggcacccgcgtccctgtgcttctggtggttccggcgcttcctcggagcgcgcggcatgtctgctcctacacgtccagcacctctgtccccagagcaaacccacctcccagggcacacgcagaggggcagtcaggcaccgcctccaccctgccccacccaggccgcgcgcaccccggaaacctggactccgcgaccagctccctcctgttcttttccgaggaccccagcggcagtgtgtcctggacccacctgtagcctccaagctcccccacctctgcgtccttcctaggcg

SEQ ID NO: 6226 - DNA, 343 bp, Homo sapiens
  misc_feature 1..343: note = U/M: M (0.62:0.11) in Breast Basal + Luminal Epithelium
  misc_feature 1..343: note = source = chr1:215255164-215255506; Gene: KCNK2 (intron)
  source 1..343: mol_type = genomic DNA
cgacagcaacgtctgatctcctggctttcttcccctccttggtgggttccgttccgtccccctgtcgctgcgagtttggctgtccctacgccggggtcttggagtttgggcggggtctggtacctgccaaatacggatcctgatggggaggaggtcggggagcgctaagttcaggctggagtctgagttctcccaccctgctgctcccacccaccgcgcttagaaacctatgtttccagcaaaggggtcttgctctgagagaacctaaccgggttttcttccattccctttgcatctctagatgtcttcgccctggctccaggtgcgttccccatccttttcg

SEQ ID NO: 6227 - DNA, 62 bp, Homo sapiens
  misc_feature 1..62: note = U/M: U (0.07:0.94) in Lung Alveolar + Bronchial cells
  misc_feature 1..62: note = source = chr2:232113287-232113348; Gene: ARMC9 (intron)
  source 1..62: mol_type = genomic DNA
cgaggcgggcggatcatgaggtcaggagttcgagaccagcctgaccaacatggtgaaacccc

SEQ ID NO: 6228 - DNA, 419 bp, Homo sapiens
  misc_feature 1..419: note = U/M: U (0.05:0.91) in Lung Alveolar + Bronchial cells
  misc_feature 1..419: note = source = chr9:125983841-125984259; Gene: STRBP (intron)
  source 1..419: mol_type = genomic DNA
cgttttgctacatttgctgtatctctgtgttttgtgaaaccatttgaaagtaagttgcagacatcttgacttcacccctaaataaatacttcagcgtcttttttaagaatccagaccaagggttttaaagaacgctccacattctgatttctctgattgtttcttcatttccggcaatgatttaaacaaaggtgatggtgcatagctcttactgcatcaagtcagggggtacttgataccagctccttgatcttaagttttagtcacttcattaaggtggtgaatgacagatctctatattgtaaaattattttccctttattaagtagaaagtaacctgtaaagtgatactttgagactgtgtaaatattttcttctcccaacagtctttcacctaatagttatggcatccagtgatc

SEQ ID NO: 6229 - DNA, 267 bp, Homo sapiens
  misc_feature 1..267: note = U/M: U (0.09:0.91) in Lung Alveolar + Bronchial cells
  misc_feature 1..267: note = source = chr14:87899146-87899412; Gene: LOC283585 (Intergenic)
  source 1..267: mol_type = genomic DNA
cgtatgctaatgtggaaactatggattaccttgagctagtgttttacttgacatagtggtacttgacatagtgtccgacaaatgtcaagtaccactattttcctcaaatatttaaactatgccagcaacaaccctatgagttaactggcataccagcatgccttgatacacagtttgggaacccacactacagacattaagttgagttttagtcaatgagaagcatcgtacggcctttacaagtatagtaaacatatatgctcagac

SEQ ID NO: 6230 - DNA, 257 bp, Homo sapiens
  misc_feature 1..257: note = U/M: U (0.07:0.87) in Lung Alveolar + Bronchial cells
  misc_feature 1..257: note = source = chr1:71656617-71656873; Gene: ZRANB2-AS2 (intron)
  source 1..257: mol_type = genomic DNA
cggtgggggcgagagcacaaccaaaagccactattaataaacaggaattctttaatggtatccaattttactgggtatgtatacacaacgctgttggagatacttcttggcagctgagatgtgatgaaagagggaggaagttgaaattactgcctggcatgaatgtttgagatgtacttgagattcatttaagtatatttttctgcctcctagttcttaacctgagtaatttttataaatcgctttacaggaccacc

SEQ ID NO: 6231 - DNA, 164 bp, Homo sapiens
  misc_feature 1..164: note = U/M: U (0.15:0.94) in Lung Alveolar + Bronchial cells
  misc_feature 1..164: note = source = chr6:107532762-107532925; Gene: PDSS2 (intron)
  source 1..164: mol_type = genomic DNA
cgtctctactaaaaatacaaaaattagccaggcgtggtggcatgtgcctgtaatcccagctactcaggaggctgaggcaggagaatcgcttgaacctgggaggcagaggttgcgttgcagtgagctgagattgcaccactgcactccagcctgggtgacagagc

SEQ ID NO: 6232 - DNA, 232 bp, Homo sapiens
  misc_feature 1..232: note = U/M: U (0.14:0.9) in Lung Alveolar + Bronchial cells
  misc_feature 1..232: note = source = chr11:75948297-75948528; Gene: WNT11 (Intergenic)
  source 1..232: mol_type = genomic DNA
cggtttctgaagtgttttaagttgcacgtgaggaggaatgaacgaagggaggtaaaaatatctttagatattaagcgtcttaccatgtgccaagcacgatataaggcattttacatattttcttagagtctttcaacatcaacatccaggtcaagggtgttttatagttatccccatttcacagatcaggaagcttgaggccatagaagtggagtgacttgcccaagggcac

SEQ ID NO: 6233 - DNA, 178 bp, Homo sapiens
  misc_feature 1..178: note = U/M: U (0.09:0.82) in Lung Alveolar + Bronchial cells
  misc_feature 1..178: note = source = chr4:813142-813319; Gene: CPLX1 (intron)
  source 1..178: mol_type = genomic DNA
cgggaggaaaggcagtttctctgaagggtccttccagcctcccagaaatctgggataagaggcatctctgccgaacccagcaaagtgagtgagtgctttctcgaccacacggcgtttgtgaagtccgttctgaacaaatgttggcattttactgttaagtgtttgcaaactgcctttc

SEQ ID NO: 6234 - DNA, 367 bp, Homo sapiens
  misc_feature 1..367: note = U/M: U (0.08:0.8) in Lung Alveolar + Bronchial cells
  misc_feature 1..367: note = source = chr5:44490688-44491054; Gene: FGF10 (Intergenic)
  source 1..367: mol_type = genomic DNA
cgatcgaagcaggccactcacctggaaatgagtctattagctttctttttatatcttatcagcagaggagtaggaaaagggagaataagattagaaagcaagaggaactttatgaagctaagtacatcagctttcaaggatctcacttctaaatttaagtgcttgctctcatgcctgccctacaatgcctagaaaaaagttctgtatttcaaatgactccctgtgattaaggtaaaatgtatcctttttttttttttgagatggagtctcgctctgtcgttcaggctggagtgcagtggcatgatctcagctcactgcaagctccacctcctcctgagttcatgctattctcctgcctcagcctccc

SEQ ID NO: 6235 - DNA, 205 bp, Homo sapiens
  misc_feature 1..205: note = U/M: U (0.1:0.82) in Lung Alveolar + Bronchial cells
  misc_feature 1..205: note = source = chr15:65519245-65519449; Gene: CILP (Intergenic)
  source 1..205: mol_type = genomic DNA
cgcaggtcccacctccagccctaaggcggtttttccctatctcagtagatggaacatacaattgggttttataccgagacattccattgcccagggacgggcaggagacagatgccttcctcttgtctcaactgcaagaggcattccttcctcttatactaatcctcctcagcacagaccctttacgggtgtcgggctgggggac

SEQ ID NO: 6236 - DNA, 145 bp, Homo sapiens
  misc_feature 1..145: note = U/M: U (0.23:0.94) in Lung Alveolar + Bronchial cells
  misc_feature 1..145: note = source = chr3:53161967-53162111; Gene: RFT1 (intron)
  source 1..145: mol_type = genomic DNA
cgagaaagcatacaagaatgaaaacactcaagaaaccatataaaaatatggttattaaaaaaaaaatccgagcgcggtagctcacacctgtaatgccagcacttcgggaggctgaggcaggtggatcacttgaggtcagaagttc

SEQ ID NO: 6237 - DNA, 436 bp, Homo sapiens
  misc_feature 1..436: note = U/M: U (0.21:0.89) in Lung Alveolar + Bronchial cells
  misc_feature 1..436: note = source = chr3:125617768-125618203; Gene: FAM86JP (Intergenic)
  source 1..436: mol_type = genomic DNA
cgtgctctctgaaacatgtgctgtgtcaactcagagttgaatggattaagggcggtgcaagatgtgctttgttaaacagatgcttgaaggcagcatgctccttaagagtcatcaccactccctaatctcaagtacccaagcacacaaaaactgcggaaggccgcagggacctctgcctaggaaagccaggtattgtccaaggtttctccccatgtgatagtctgaaatatggcctcgtaggaaaggaaagacctgactgtcccccagcccgacacccgtaaagggtctgtgctgaggaggattagtaaaagaggaaagaatgcctcttgcagttgagacaagaggaaggcatctgtctcctgcctgtccctaggcaatggaatgtctcagtataaaacccgattgtatgctccatctactgagataaggaaaaacc

SEQ ID NO: 6238 - DNA, 156 bp, Homo sapiens
  misc_feature 1..156: note = U/M: U (0.23:0.9) in Lung Alveolar + Bronchial cells
  misc_feature 1..156: note = source = chr15:72470213-72470368; Gene: GRAMD2 (intron)
  source 1..156: mol_type = genomic DNA
cgtgtgccaacacgcccagctaattgttgtatttttagcagagacggggtttcaccatgttggccaggctggtcttgaacccctcacttcaagtgatccacccgcctcggcctcccaaagtgctgggattataggcgtgagccaccgcacctggcc

SEQ ID NO: 6239 - DNA, 225 bp, Homo sapiens
  misc_feature 1..225: note = U/M: U (0.26:0.9) in Lung Alveolar + Bronchial cells
  misc_feature 1..225: note = source = chr2:179044777-179045001; Gene: RBM45 (Intergenic)
  source 1..225: mol_type = genomic DNA
cgggaggcagaggttgcagtgagaccgtgccattgcactctagccggggcaacaagagtgaaactctgtgacacacacacacacacacacagaaatgttgaaaatgtcttaacacttgatacatacttgaaaaaataaataaataaaagctttcttttctacccgtgagccctgcagcttttatctcactcttgtctgagtccttagtgttctgctcaagactgc

SEQ ID NO: 6240 - DNA, 235 bp, Homo sapiens
  misc_feature 1..235: note = U/M: U (0.24:0.88) in Lung Alveolar + Bronchial cells
  misc_feature 1..235: note = source = chr7:66074579-66074813; Gene: KCTD7 (Intergenic)
  source 1..235: mol_type = genomic DNA
cgctcttgttgcatgggctggagtgcaatggcatgacctcggctcactgcaacctctacctcctgggttcaagcgattctcctgcctcagcctcccaagcagcttggattacaggcacccaccaccacgcccagttaatttttgtatttcttttttttttactttttaatttaattttattttatttttgagatggagtttcactcttgttgcccaggctggagagaaatgctgc

SEQ ID NO: 6241 - DNA, 275 bp, Homo sapiens
  misc_feature 1..275: note = U/M: U (0.16:0.8) in Lung Alveolar + Bronchial cells
  misc_feature 1..275: note = source = chr3:127724452-127724726; Gene: SEC61A1 (Intergenic)
  source 1..275: mol_type = genomic DNA
cgaactcctgatctcaagtgatcaccctgcctcagcctcccaaagtgctgggattacaggtatgagtcaccccgcctggccaaacattccaatttttaagtgttgacaatgaattcttacaaatttaatactacacagccctcttgccacatttggcctacggggtatcagtttgcagccctgggaaggatgaagcgagggagaggaaggtagtgcaggctccttcccagggagtggggacacagaaaaaggggcaagcagccccatttgtttgc

SEQ ID NO: 6242 - DNA, 101 bp, Homo sapiens
  misc_feature 1..101: note = U/M: U (0.28:0.86) in Lung Alveolar + Bronchial cells
  misc_feature 1..101: note = source = chr7:155189643-155189743; Gene: EN2 (Intergenic)
  source 1..101: mol_type = genomic DNA
cggttagtgaccgtggccccgcacagcctgcttggtctcctgctgtgttatcagggaatgggttcttgagcagcaattgtgcccccgtggcaaagggaagc

SEQ ID NO: 6243 - DNA, 428 bp, Homo sapiens
  misc_feature 1..428: note = U/M: U (0.33:0.89) in Lung Alveolar + Bronchial cells
  misc_feature 1..428: note = source = chr14:81469419-81469846; Gene: TSHR (intron)
  source 1..428: mol_type = genomic DNA
cggtgtttgctaatgcctcttaactgccagtttaaaagactgctgtttagtttcttttgtgctgttatttctgcaacatataatatttctgtgacaaatagactcagttctccttctacttcattttcattctactgctccggtgactcgctcattaaaggttgacctccccaggtgtttcatcctttgtcctttttgtacagtacacatgctccttagaaaaatctcatccaatttaaagtgtcagctatcacctggataataatgactgccacattttatcattagccctgacctcttccttgtgcttcagactacatttcctatttgcctcctgtgtccagccccaccacttgacctgggcactaccaattcccccattgtaatgtcagaatggtgcacgctgtttttgtgaagtgacatctttc

SEQ ID NO: 6244 - DNA, 87 bp, Homo sapiens
  misc_feature 1..87: note = U/M: U (0.03:0.9) in Lung Alveolar + Bronchial cells
  misc_feature 1..87: note = source = chr3:183485515-183485601; Gene: YEATS2 (intron)
  source 1..87: mol_type = genomic DNA
cgctggtctcaaactcctgacctctaatgatccgcccacctcggcctcccaaagtgctgggattacaggcatgagccaccacgcccg

SEQ ID NO: 6245 - DNA, 128 bp, Homo sapiens
  misc_feature 1..128: note = U/M: U (0.05:0.89) in Lung Alveolar + Bronchial cells
  misc_feature 1..128: note = source = chr8:429506-429633; Gene: C8orf42 (Intergenic)
  source 1..128: mol_type = genomic DNA
cgccattcatgttgcttatctgttaacctcttccccaaaccctgctcttccagcagacggcgcacacactgtgccacacgtgtggctgaaaggatagccatgcgtggggatagccggaggtgcggtcg

SEQ ID NO: 6246 - DNA, 406 bp, Homo sapiens
  misc_feature 1..406: note = U/M: U (0.04:0.86) in Lung Alveolar + Bronchial cells
  misc_feature 1..406: note = source = chr2:114113839-114114244; Gene: PAX8 (Intergenic)
  source 1..406: mol_type = genomic DNA
cgaattgtactcgcaggatgctgggtgcccaggtgggattccagaaggagttgaggcattgtgcatttcctaaatgctagagcatacctttggtgctggtgaataaagcttatgttctcacgggctttccctaacgctgcagagatgcattacctccaggtgacaatggcttgggacactccagggttacctttctcttcaaccccagctgccttgtcaaaggcctaatgagctgtaaaccaatacttaggaatgcaaaggccacaccctacttgaaggggtttggctcatattaagtgttcaataagtgtttgctaaataacttttaaaacaagaattccaagagccattcactttagaatatgaattcgcaggtatttattgcgattactgcttctcatttacg

SEQ ID NO: 6247 - DNA, 204 bp, Homo sapiens
  misc_feature 1..204: note = U/M: U (0.09:0.9) in Lung Alveolar + Bronchial cells
  misc_feature 1..204: note = source = chr19:51593003-51593206; Gene: KLK14 (Intergenic)
  source 1..204: mol_type = genomic DNA
cgtagccatgggagagctcatgagtacctccggtattgttactcccctcattgtacagatggaggaagccaagatggagatgctcggccacgtgccaaggttacacaacgctgaacgggggcgccgtgatttgaacgcaggtggagagctctcaaccacctcacgaaatgttcaagaacaaaggagtggatggtgcaaccagcg

SEQ ID NO: 6248 - DNA, 38 bp, Homo sapiens
  misc_feature 1..38: note = U/M: U (0.13:0.93) in Lung Alveolar + Bronchial cells
  misc_feature 1..38: note = source = chr2:230139684-230139721; Gene: PID1 (Intergenic)
  source 1..38: mol_type = genomic DNA
cgctatcgcccaggctggagtgcagtggcgcgatctcg

SEQ ID NO: 6249 - DNA, 382 bp, Homo sapiens
  misc_feature 1..382: note = U/M: U (0.1:0.9) in Lung Alveolar + Bronchial cells
  misc_feature 1..382: note = source = chr8:48474333-48474714; Gene: KIAA0146 (intron)
  source 1..382: mol_type = genomic DNA
cgtaagggttactatgggtcgacatatagccttgtataacatgtacggtaactgacacattatatctcgtacactgatacaaagaagtggttttgaaataatactgagaagtggaatactgaattttgtttgtaaagcatgactacaaaccacaaaatatgttcaaagaaagaggtgagggaattacacaagtgttcggctgtctgccttgtgattttttcctccttttccaatctttccaagtttttataatgttcacttcttttataaccagaaaaagatttgtttctcttgtctcttttatgcttcctttatatgtatcttagagtgatcacatccacttataataatttcacctagttaacagctatagccctaggcg

SEQ ID NO: 6250 - DNA, 307 bp, Homo sapiens
  misc_feature 1..307: note = U/M: U (0.03:0.8) in Lung Alveolar + Bronchial cells
  misc_feature 1..307: note = source = chr9:948548-948854; Gene: DMRT1 (intron)
  source 1..307: mol_type = genomic DNA
cgggacagaccatccttcccctgcgctctgctgtgttggggcccagaaggctccgcaacaagtggttgatttaaaagaaaacctggaattttaccaagcagcttacactgtgttgactgaaacactcagaatctgccaggcagcaaacagttgagtggccacccaacactttactccacccaatcacacaatgggtccttaaagtctctccctttaaaaacaaaacaggctggcgcggtagcttatgcctgtaatcctagcacttcgggaggccaaagtggatggatcacttgaggtcaggagttcg

SEQ ID NO: 6251 - DNA, 45 bp, Homo sapiens
  misc_feature 1..45: note = U/M: U (0.16:0.92) in Lung Alveolar + Bronchial cells
  misc_feature 1..45: note = source = chr7:50595652-50595696; Gene: DDC (intron)
  source 1..45: mol_type = genomic DNA
cggcgcgatctcggctcactgcaacctccgcctcccgggttcacg

SEQ ID NO: 6252 - DNA, 155 bp, Homo sapiens
  misc_feature 1..155: note = U/M: U (0.14:0.9) in Lung Alveolar + Bronchial cells
  misc_feature 1..155: note = source = chr5:125859310-125859464; Gene: ALDH7A1 (Intergenic)
  source 1..155: mol_type = genomic DNA
cgggttcaagcaattctcctgcctcagcttccggagtagcagggattacaggtatgcaccaccagctaatttttgtatttttcgtacagataaggtttcaccatgttggccaggttggtctcaaactcctgaccccaggtgatccacccgcctcg

SEQ ID NO: 6253 - DNA, 223 bp, Homo sapiens
  misc_feature 1..223: note = U/M: U (0.14:0.9) in Lung Alveolar + Bronchial cells
  misc_feature 1..223: note = source = chr2:207790148-207790370; Gene: CPO (Intergenic)
  source 1..223: mol_type = genomic DNA
cgggtacttggtttaaaaagacttaagagtaacacttgagtttaacggtgttgggagtggagtctacttattcatcaccgaaggggctcaatcgcattgcttcccaaagaaagttgagagactgtgctccctgcactgtgtaattgtagcttgatccactagtcatagattcttagaaataagtaaacatacagatcttcaaatgagactctcaacttcagcg

SEQ ID NO: 6254 - DNA, 350 bp, Homo sapiens
  misc_feature 1..350: note = U/M: U (0.08:0.84) in Lung Alveolar + Bronchial cells
  misc_feature 1..350: note = source = chr17:19796075-19796424; Gene: ULK2 (Intergenic)
  source 1..350: mol_type = genomic DNA
cgttttctggctatttagaactgttatcgagtttgtattggggtcaagcagtattgcagaagaaaataaggcatttaagttttaggtcaggtgtgagttgaagagcttttaagttcttgagaacacaggctaagggaggagaagggggaatggagggcggaagtttgccctaagtgaaggaggtaagtttaaagagaaaagtagagacacagagaagaggggcggtgagtagtcaaagcaggtgttcccgcaattgacttgccaccaagggaatgtgggtgaatgaccaaggcaggcattcccgcagtgatcagacaccaatggagtgttggtgaataatcaggcaggcg

SEQ ID NO: 6255 - DNA, 75 bp, Homo sapiens
  misc_feature 1..75: note = U/M: U (0.05:0.8) in Lung Alveolar + Bronchial cells
  misc_feature 1..75: note = source = chr1:48750621-48750695; Gene: SLC5A9 (Intergenic)
  source 1..75: mol_type = genomic DNA
cgagcgctgtgctgagagatctactgctctcttcagagccagcacgcaggaacgtttaagtctgctgaagctgcg

SEQ ID NO: 6256 - DNA, 213 bp, Homo sapiens
  misc_feature 1..213: note = U/M: U (0.08:0.83) in Lung Alveolar + Bronchial cells
  misc_feature 1..213: note = source = chr6:75919914-75920126; Gene: COL12A1 (Intergenic)
  source 1..213: mol_type = genomic DNA
cgaaataacctcccctactagcgaatgagcaactttggagcagaaagcagaaactgcatcatatttctcttactatgcaaactggtagctcaaacctcatatgacctcaaaaaactataattgcttcaacctaaaaaagctgattgtaaaaaaaaaaaaaagctgtggttgcacacacgtgttcaaaaaacacggtatccacataaaataacg

SEQ ID NO: 6257 - DNA, 273 bp, Homo sapiens
  misc_feature 1..273: note = U/M: U (0.18:0.91) in Lung Alveolar + Bronchial cells
  misc_feature 1..273: note = source = chr10:129791109-129791381; Gene: PTPRE (intron)
  source 1..273: mol_type = genomic DNA
cgtgcccaggcatttgtaataaccgcgtaagtgggagtcttcatttttctccagaacaagtagcccctttctgaaattcatcataaagctaaaaaataaataagaattgttttatttcagtgaggctgtagtgcatttttttaatgtgtctgctgtgtatatcacagtgtgcctgggatatctgaaaaagtttgaagttgccccggtcacagaatctagggtcctgattgaaaatgagcagagggttgaggaaatagactcactgaaattgcg

SEQ ID NO: 6258 - DNA, 189 bp, Homo sapiens
  misc_feature 1..189: note = U/M: U (0.2:0.92) in Lung Alveolar + Bronchial cells
  misc_feature 1..189: note = source = chr3:100988813-100989001; Gene: IMPG2 (intron)
  source 1..189: mol_type = genomic DNA
cgcccaggctggagtgcagtggtgcgatcttggctcactgcaaactccaccttccaggttcaagcaattgtcctgcctcagcctcctgagcagctggaattaggaattacaggtgtgcgccaccatgctcggctaattttgtatttttactagaggcggggtttcaccgtgttggccaggctggtctcg

SEQ ID NO: 6259 - DNA, 235 bp, Homo sapiens
  misc_feature 1..235: note = U/M: U (0.12:0.84) in Lung Alveolar + Bronchial cells
  misc_feature 1..235: note = source = chr4:3617771-3618005; Gene: FLJ35424 (Intergenic)
  source 1..235: mol_type = genomic DNA
cggcattgagtggtgggtttcaccccatttccccagcctagcttgcctgtccacctgcgggagtggcggcggtgtgagctgtggtctctgttgattgcagggattctggtggtgggtcggcggggtctgtgtgagggccacttgacatgcctctttaaaccagaagtgttttcctaaactcctggggtttgcgccccacatgtttcttttgtctgactttaagaaatggcattcg

SEQ ID NO: 6260 - DNA, 184 bp, Homo sapiens
  misc_feature 1..184: note = U/M: U (0.12:0.83) in Lung Alveolar + Bronchial cells
  misc_feature 1..184: note = source = chr14:85435653-85435836; Gene: FLRT2 (Intergenic)
  source 1..184: mol_type = genomic DNA
cgtcttttgcctgggtttgccgatccttctattgccatcttgcatccttcactctgctccttacagttcctggagcaagcacttcctcttgacagaaatccccaccaccaataataatgaaacaggatagtttccttgatgcttttgcgggacttgtgaagtgggtggctcgtttactcagccg

SEQ ID NO: 6261 - DNA, 227 bp, Homo sapiens
  misc_feature 1..227: note = U/M: U (0.22:0.93) in Lung Alveolar + Bronchial cells
  misc_feature 1..227: note = source = chr6:121423085-121423311; Gene: C6orf170 (intron)
  source 1..227: mol_type = genomic DNA
cgataacagacaaacagagagccaaatcctgagtgaactcccattcacaattgcttcaaagagaataaaatacctaggaatccaacttacaagagatgtgaaggacctcgtcaaggagaactacaaaccactactcaacgaaataaaagagaatacaaacaaatgaaagaacattccatgctcatggataggaagaatcaacaccgtgaaaatggccatactgcccg

SEQ ID NO: 6262 - DNA, 233 bp, Homo sapiens
  misc_feature 1..233: note = U/M: U (0.14:0.85) in Lung Alveolar + Bronchial cells
  misc_feature 1..233: note = source = chr13:106988723-106988955; Gene: LINC00460 (Intergenic)
  source 1..233: mol_type = genomic DNA
cgtcaaaagaaaacagattttttttcatatttagttactataatctctcacccactccttttttctcactgaaacatccagtcacagttattttaaagcatattcttcagccttaatctgtatcccagcacttttcaaagaggaattctgtagctctgtcccaaggctcggcacgcctggtggatttagtccagtctcggtgggatagtctttaaccgagctggtggaattcg

SEQ ID NO: 6263 - DNA, 160 bp, Homo sapiens
  misc_feature 1..160: note = U/M: U (0.13:0.83) in Lung Alveolar + Bronchial cells
  misc_feature 1..160: note = source = chr1:61509550-61509709; Gene: NFIA (Intergenic)
  source 1..160: mol_type = genomic DNA
cgcgttttcgagtgccagaccaagagtcttaagttcagctccaggaagacagggtagtggcgggaaagaacattctgacgacggggaagtttgagttggttggggctgagtcaataaagtcgccccttgagccttttgttttgaggctttgattgcaacg

SEQ ID NO: 6264 - DNA, 253 bp, Homo sapiens
  misc_feature 1..253: note = U/M: U (0.2:0.9) in Lung Alveolar + Bronchial cells
  misc_feature 1..253: note = source = chr5:73367049-73367301; Gene: ARHGEF28 (Intergenic)
  source 1..253: mol_type = genomic DNA
cgctttgtcactcaggctggagtgccgtgacacgatcatagctcactgcagcatctgactcctgggctcaagcaatcctctcacctcagcctcttgagtagctgggactacagccatgtgacaccacgcctggcttatattaactttttgtagagatggggatctcattatgtttgcccaggctggtcttgaattccaggcctcaagtgatcccccggccttggcctcccaaagcactgggattacaggtgcg

SEQ ID NO: 6265 - DNA, 185 bp, Homo sapiens
  misc_feature 1..185: note = U/M: U (0.15:0.84) in Lung Alveolar + Bronchial cells
  misc_feature 1..185: note = source = chr14:95541336-95541520; Gene: MIR3173 (Intergenic)
  source 1..185: mol_type = genomic DNA
cgttttagtaatatctcacattcgatcccaaaggatctcaaataccttcgacccttcaccagggcacttcaccataattcataacgaggtaatcaaatacttcactgtaaggcagccaccgccacatgagaggattaactcacctatcaaggaagggtaggcagggctgggacagaaggcagccg

SEQ ID NO: 6266 - DNA, 72 bp, Homo sapiens
  misc_feature 1..72: note = U/M: U (0.24:0.92) in Lung Alveolar + Bronchial cells
  misc_feature 1..72: note = source = chr12:118298749-118298820; Gene: KSR2 (intron)
  source 1..72: mol_type = genomic DNA
cgtgaccccatgtgatccacccgcctcggcctcccaaagtgctgagattacaggcgtgagccactgcgcccg

SEQ ID NO: 6267 - DNA, 76 bp, Homo sapiens
  misc_feature 1..76: note = U/M: U (0.15:0.83) in Lung Alveolar + Bronchial cells
  misc_feature 1..76: note = source = chr4:4156493-4156568; Gene: OTOP1 (Intergenic)
  source 1..76: mol_type = genomic DNA
cgcgtcaccacgcccggctcattgtttgtgttttccgtagagacggggtttcaccatgttggccaggcaggtctcg

SEQ ID NO: 6268 - DNA, 190 bp, Homo sapiens
  misc_feature 1..190: note = U/M: U (0.2:0.88) in Lung Alveolar + Bronchial cells
  misc_feature 1..190: note = source = chr1:26214209-26214398; Gene: STMN1 (intron)
  source 1..190: mol_type = genomic DNA
cgctctgtcgccaggctggactgtaatggcgcaatcttggctcactgtaacctccgcctcccgagttcaagtggttctcctgcgtcagcctcctgagtagctgggactacaggcatgtgccatcatgcctggctaatttttgtatttttaatagagacggggtttcgccattttggccaggatggtctcg

SEQ ID NO: 6269 - DNA, 205 bp, Homo sapiens
  misc_feature 1..205: note = U/M: U (0.22:0.9) in Lung Alveolar + Bronchial cells
  misc_feature 1..205: note = source = chr5:180254663-180254867; Gene: LINC00847 (Intergenic)
  source 1..205: mol_type = genomic DNA
cgtcccccagcccgacacccgtaaagggtctgtgctgaggaggattagtataagaggaaggcatgcctcttgcagttgagacaagaggaaggcatctgtctcctgcccgtccctgggcaatggaatgtctcggtataaaacccaatttacgttccatctactgagatagggaaaaaccgccttagggctggaggtgggacatgcg

SEQ ID NO: 6270 - DNA, 139 bp, Homo sapiens
  misc_feature 1..139: note = U/M: U (0.23:0.89) in Lung Alveolar + Bronchial cells
  misc_feature 1..139: note = source = chr1:240077042-240077180; Gene: RPS7P5 (Intergenic)
  source 1..139: mol_type = genomic DNA
cgtaagtttgtaactgcacagtgttttgttgtacggctcagaaatgagcaagtgttagtattattaggcacacatcacgttcacagcttcgcgcagagacggatagtgtatttggatatatggaagtcatccaaatgcg

SEQ ID NO: 6271 - DNA, 364 bp, Homo sapiens
  misc_feature 1..364: note = U/M: U (0.15:0.81) in Lung Alveolar + Bronchial cells
  misc_feature 1..364: note = source = chr2:103454245-103454608; Gene: TMEM182 (Intergenic)
  source 1..364: mol_type = genomic DNA
cgcaggctggttttgttctctctctgctctgggcaggagacttccagggaagttacctgtttaaggaggcagaagtggcttctgagggttcctcacccttagggctagctacgtcattcatggggcttagggcaaaatgtaaacacagggccccttgttgaaaaattactgagaatttcaagacggcggcagcaaagcactaaacaaagtgcagggcccttctcagcgccaggccctgtgtgactgcccaaggtaaccctaccccggaagctggccctgccccagcatcagtggatgattgtttataaattcatgaagtcttattccctttttcttgataaacctaattctctaatgctgcacg

SEQ ID NO: 6272 - DNA, 368 bp, Homo sapiens
  misc_feature 1..368: note = U/M: U (0.18:0.84) in Lung Alveolar + Bronchial cells
  misc_feature 1..368: note = source = chr11:40977506-40977873; Gene: LRRC4C (intron)
  source 1..368: mol_type = genomic DNA
cgaagggtgcagtcttcttcaaattagaattcaaggtcatattgacagagcccttaagccaaccagtctttttggttttctatatactcctgttagctttacttacaaagggccatattgtagatgagaaagcgaggttgagggctcttgaacagtgagcaatggaacaacgtatatctgagggtagcacaagtgacggcgataccaaaaacaaataaccttgtgctgatcggctgtgaaaattcagcaaactcaatagccctctaaattcctcatttcattcctggattgtaaaatacattcttatacttatttgctggctaacattctgtccagagtcttttaaaaaggaattcttataaattacg

SEQ ID NO: 6273 - DNA, 378 bp, Homo sapiens
  misc_feature 1..378: note = U/M: U (0.2:0.86) in Lung Alveolar + Bronchial cells
  misc_feature 1..378: note = source = chr2:172855891-172856268; Gene: METAP1D (Intergenic)
  source 1..378: mol_type = genomic DNA
cggagaggaagagcaaacagaacataaccaaaggaagaggataatgcctcaaagttgaagaaatgaatcttcagactataagagctccctgaagtttgagcagcgttactaacatttactgagcactttctattgttggctaagcacttgcatgagttatctcaattctcattaacaaccctctgaggtacttggtatcctcaagtgaggcctaggaaggttatcttcaccaaggtcacacagctagtaagtggcagagctggaaatttggcccatgcaatatgactcacttagattctcaaccactgtaccgctaccacttacctaaaaagatcgactcacaggccaaattattaagttacttacctaaaaagatcg

SEQ ID NO: 6274 - DNA, 435 bp, Homo sapiens
  misc_feature 1..435: note = U/M: U (0.23:0.89) in Lung Alveolar + Bronchial cells
  misc_feature 1..435: note = source = chr3:27317025-27317459; Gene: NEK10 (intron)
  source 1..435: mol_type = genomic DNA
cgtgtcagctcaaactctatagacactatatccggttaacgggaagtaaaccacagaacaagttcaaagcaaggcatgtcgacagacctacaaaaaccatgaatagagtccatcatatatgtatttgaccaggaggttttgtaagtatatgagtaatgtgcacataaggactttgagttccctatcagaaatgcaatactaactcttttttttatataatgacacaaatttctcagccacagtttagccaaccaataacaattaaaagtcctctaatcctctgaaaaatttaaaatactgaagattctggcaatacagggtaggtccaattcaatgtctgaaactttggtggcattcaagaaagtaaaattttttctttgagttactgtttgctaagatgacagtgggaactgcttggacctttgcccatgtgcg

SEQ ID NO: 6275 - DNA, 114 bp, Homo sapiens
  misc_feature 1..114: note = U/M: U (0.23:0.88) in Lung Alveolar + Bronchial cells
  misc_feature 1..114: note = source = chr16:11402006-11402119; Gene: PRM1 (Intergenic)
  source 1..114: mol_type = genomic DNA
cgggcgtgtttctgccctgtttgtgttacagttccttcagccctgccattcggcagttcccgagttcttgtcttgcttccaagaagaatgaggtacgcagacaagcgtagggcg

SEQ ID NO: 6276 - DNA, 149 bp, Homo sapiens
  misc_feature 1..149: note = U/M: U (0.24:0.89) in Lung Alveolar + Bronchial cells
  misc_feature 1..149: note = source = chr1:10560776-10560924; Gene: PEX14 (intron)
  source 1..149: mol_type = genomic DNA
cgtgcaccaccacggccagctaatttttgtatttttagcaaagacggggttttgccatgttggccaggttggtctcgaactcctaggctcaagtgatcctcctgccttggcctcccaaagtgctgggattgcaggcatgagccaccacg

SEQ ID NO: 6277 - DNA, 196 bp, Homo sapiens
  misc_feature 1..196: note = U/M: U (0.18:0.83) in Lung Alveolar + Bronchial cells
  misc_feature 1..196: note = source = chr7:71070144-71070339; Gene: WBSCR17 (intron)
  source 1..196: mol_type = genomic DNA
cgctcttgaatactatgcagttaaggaaaattacaccggatgccagccttccgtttatttattcttttgctcatgtattcaatatttacacagcaaaggagtgcctactaggtttccgacagaggactgggttccaggcatagaactggccaaccacgatggctcacacccataatctcagcactttgggaggccg

SEQ ID NO: 6278 - DNA, 206 bp, Homo sapiens
  misc_feature 1..206: note = U/M: U (0.24:0.89) in Lung Alveolar + Bronchial cells
  misc_feature 1..206: note = source = chr7:3450257-3450462; Gene: SDK1 (intron)
  source 1..206: mol_type = genomic DNA
cgcctaggctggagtgcagtggcacgatctcagcttactgcaacctccgcctcccaggttcaagcagttctcttgcctcagccttctaagtagctggggttacaggcacacactaccatgcccaactaatttttgtattttcagtagagacaggctttcaccattttggccatgctggtctcgaactcctgacctcaggtgatccg

SEQ ID NO: 6279 - DNA, 418 bp, Homo sapiens
  misc_feature 1..418: note = U/M: U (0.22:0.87) in Lung Alveolar + Bronchial cells
  misc_feature 1..418: note = source = chr21:47928925-47929342; Gene: DIP2A (intron)
  source 1..418: mol_type = genomic DNA
cgtctaaagcaaaaaaacaaaaacaaaaaaaaacctgctagcttagaacaagtcctgtttcctggaaggcattcagtaagtgttttctaaatgaattgattccaaaatgactgtccagtggggcccacacttggatggatttgtaagctctgatgcatcgtgtggtttgtccttggaccttacacctgtgtccacttcttcagatgtgtcctggcctcagtgctcctctgtccttcccgtgacaggtgtccctgtgaacagcagagtgtcctccaaaatccagcagcttctgaacaccctgaagaggccaaagcgccctccactgaaggagttctttgtggatgattttgaggaattgttggaaggtaagagttgtccaactttgagcttttctgtttgtatgaaaagggtggccacg

SEQ ID NO: 6280 - DNA, 76 bp, Homo sapiens
  misc_feature 1..76: note = U/M: U (0.24:0.88) in Lung Alveolar + Bronchial cells
  misc_feature 1..76: note = source = chr1:22762726-22762801; Gene: ZBTB40 (Intergenic)
  source 1..76: mol_type = genomic DNA
cggacgcggtggctcatgcctgtaatcccagcactttgggagggcgaggcaggtggatcacgaggtcaggaggtcg

SEQ ID NO: 6281 - DNA, 108 bp, Homo sapiens
  misc_feature 1..108: note = U/M: U (0.14:0.78) in Lung Alveolar + Bronchial cells
  misc_feature 1..108: note = source = chr7:92042225-92042332; Gene: GATAD1 (Intergenic)
  source 1..108: mol_type = genomic DNA
cggcaacactccacagcacccctccttcctcttctccgcacgagccagccttggttgcgtgactaccgtccccgtccaatcagacgcagaataaaaatgaaaaggtcg

SEQ ID NO: 6282 - DNA, 159 bp, Homo sapiens
  misc_feature 1..159: note = U/M: U (0.28:0.92) in Lung Alveolar + Bronchial cells
  misc_feature 1..159: note = source = chr1:202001636-202001794; Gene: ELF3 (Intergenic)
  source 1..159: mol_type = genomic DNA
cggctcacacctgtaatcctagcactttaggaggcctaaggaggatcgcttgaggccgagagtttgagaccagcctggtcaacatagggagactccggtcttggctcacacctgtaatcctagcactttaggaggcctaaggaggatcgcttgaggccg

SEQ ID NO: 6283 - DNA, 288 bp, Homo sapiens
  misc_feature 1..288: note = U/M: U (0.2:0.84) in Lung Alveolar + Bronchial cells
  misc_feature 1..288: note = source = chr10:115875121-115875408; Gene: MIR2110 (Intergenic)
  source 1..288: mol_type = genomic DNA
cgtaatacataattccacaaaaaccctgcaccctcttccccatccctccaacacacatacacacaaggttaccatagctaggactttagtgtgtatctttccagaaccccctccttaaaaaaatacatacatatatgttaagctggtatatctctaggttgatttataattataaaggtacaaagtgacatgaggaatcaccatggaacatcttccataaacacgatacattagcccaaaggctgctggtcctacttcatgcggcacgccagccatccgatgcgtacg

SEQ ID NO: 6284 - DNA, 343 bp, Homo sapiens
  misc_feature 1..343: note = U/M: U (0.2:0.84) in Lung Alveolar + Bronchial cells
  misc_feature 1..343: note = source = chr2:111498715-111499057; Gene: ACOXL (intron)
  source 1..343: mol_type = genomic DNA
cgattcctcaagcagtgatttccagtgtgtttatctggagtattatggtgttgcgtcagcttaatagggctgccgtaataatgtacccgggctaggtggcttaaataacagaaatgtattgtctcagagttccggaggctgagaatccaagatcaaggtgtcagtgggtgtcggcagggttggttgcttctgagggctgcaagggagaatctgctgcaggcctctctccttggcttgttggtggctgtcttttttcctgtcttcacatggtcttccctctgtacctgtctgtcttcaaattttagaaggacaccagtcaatatctgaatttttagggggagcg

SEQ ID NO: 6285 - DNA, 386 bp, Homo sapiens
  misc_feature 1..386: note = U/M: U (0.22:0.86) in Lung Alveolar + Bronchial cells
  misc_feature 1..386: note = source = chr13:54890942-54891327; Gene: MIR1297 (Intergenic)
  source 1..386: mol_type = genomic DNA
cgaggtcttattaatagcaaagaataataattgaaatcccaaacttactaacctaaagtaagtttgctaaaatttcacagtgtaacatatattatcctaacttttaatcttatggaaatcaaacactataagtacccctcaaagcttaagtccatcagcgcagagccatacaactaatacccctacttatagggttaggaatggctactgctacaggaaccggaatagccagtttatctacttcattatcctgctaccacacactctcaaaggatttctcagacagtctgcaagaaatgaagaaatctatccttactgaagaaatctatccttactctgcagtctcaaatagactctttagaagcagtgactctccaaaaccgccg

SEQ ID NO: 6286 - DNA, 71 bp, Homo sapiens
  misc_feature 1..71: note = U/M: U (0.27:0.9) in Lung Alveolar + Bronchial cells
  misc_feature 1..71: note = source = chr1:10560188-10560258; Gene: PEX14 (intron)
  source 1..71: mol_type = genomic DNA
cggtgctcacgcctgtaatcccagcactgtgggaggccgaggcgggtggatcacctgaggtcaggagttcg

SEQ ID NO: 6287 - DNA, 96 bp, Homo sapiens
  misc_feature 1..96: note = U/M: U (0.2:0.82) in Lung Alveolar + Bronchial cells
  misc_feature 1..96: note = source = chr19:38548317-38548412; Gene: SIPA1L3 (intron)
  source 1..96: mol_type = genomic DNA
cgctctgtcgcccaggctggagtgcagtggcgcaatcttggctcactgcaagctccgcctcccaggttcatgccactctcctgcctcagcctcccg

SEQ ID NO: 6288 - DNA, 195 bp, Homo sapiens
  misc_feature 1..195: note = U/M: U (0.16:0.78) in Lung Alveolar + Bronchial cells
  misc_feature 1..195: note = source = chr1:46786373-46786567; Gene: UQCRH (Intergenic)
  source 1..195: mol_type = genomic DNA
cgacacccgtaaagggtctgtgctgaggagaattagtaaaagaggagggaatgcctctttgcagttgagacaagaggaaggcatctctctcctgcgcgtccctgggcaatggaatgtctcagtgtaaaacccaattgtatattccatctactgagataggggaaaaccgcctcaggggtggaggtgggacatgcg

SEQ ID NO: 6289 - DNA, 203 bp, Homo sapiens
  misc_feature 1..203: note = U/M: U (0.24:0.86) in Lung Alveolar + Bronchial cells
  misc_feature 1..203: note = source = chr16:8826332-8826534; Gene: ABAT (intron)
  source 1..203: mol_type = genomic DNA
cgcccttaatccatttaaccctgagtggacacagcacatgtttcagagagcacggggttgggggtaaggtcacagatcaacaggatcccaaggcagaagaagttttcttagcacagaacaaaatgaaaagtctcccatgtctacttctttctacacagacacggcaaccatccgatttctcaatcttttccccacctttcccg

SEQ ID NO: 6290 - DNA, 241 bp, Homo sapiens
  misc_feature 1..241: note = U/M: U (0.24:0.86) in Lung Alveolar + Bronchial cells
  misc_feature 1..241: note = source = chr15:67674267-67674507; Gene: IQCH (intron)
  source 1..241: mol_type = genomic DNA
cgagattgcaccactgcattgccagcctgggcaacagagtgataccctgtcaaaaaaaaaaaaagaattaaaagattttttgagtacgggcttcacacgtgtttcattcgtttatttgactggagatttcacaagtgcctgctctaacatagctaagagtctggttacaggagctagagtgatgcaggggaaagaagaaatggacaacaaagtaaacaaccaagcaaagaaatatgtaacg

SEQ ID NO: 6291 - DNA, 368 bp, Homo sapiens
  misc_feature 1..368: note = U/M: U (0.19:0.81) in Lung Alveolar + Bronchial cells
  misc_feature 1..368: note = source = chr3:127131170-127131537; Gene: TPRA1 (Intergenic)
  source 1..368: mol_type = genomic DNA
cggccttccgcagtgtttgtgtccctgggtacttgagattagggagtggtgatgactcttaaggagcatgctgccttcaagcatttgttcaacaaagcacatcttgcacaacccttaatccatttaaccctgagtttgacacagcacatgtttcagagagcacggggttgggggtaaggtcacagaatctcaaggcagaagaatttttcttagtacagaacaaaatggagtctcctatgtctacttctttctatacagacacagtaacaatctgatctctcttgcttttccccacagatactcatgctagagctggcccttcagagacgaggcctgacagcctctcaccagcctctctggtctgcacg

SEQ ID NO: 6292 - DNA, 74 bp, Homo sapiens
  misc_feature 1..74: note = U/M: U (0.29:0.9) in Lung Alveolar + Bronchial cells
  misc_feature 1..74: note = source = chr15:63244269-63244342; Gene: TPM1 (Intergenic)
  source 1..74: mol_type = genomic DNA
cgtagatgcgtttgtgttctggtagcatgcaaagtccctcttcgacatgtgaatattagttatcaaaatgcgcg

SEQ ID NO: 6293 - DNA, 99 bp, Homo sapiens
  misc_feature 1..99: note = U/M: U (0.28:0.89) in Lung Alveolar + Bronchial cells
  misc_feature 1..99: note = source = chr17:76793232-76793330; Gene: USP36,USP36 (TTS,exon)
  source 1..99: mol_type = genomic DNA
cgggttattgcagctgcaagggaagctacagcacagtcgtctcagaataaacagcagcctggaaagcagatgtattcgcaggtatcgagggctcctccg

SEQ ID NO: 6294 - DNA, 129 bp, Homo sapiens
  misc_feature 1..129: note = U/M: U (0.27:0.88) in Lung Alveolar + Bronchial cells
  misc_feature 1..129: note = source = chr4:35107603-35107731; Gene: ARAP2 (Intergenic)
  source 1..129: mol_type = genomic DNA
cggctcagataatgagccggcatttgtggctgacttagtacagaagacagcaaaggtactgggaatcacatggaagttacatgctgcctaccgacctcagagttccggaaaggtggagcgaatgaatcg

SEQ ID NO: 6295 - DNA, 167 bp, Homo sapiens
  misc_feature 1..167: note = U/M: U (0.29:0.9) in Lung Alveolar + Bronchial cells
  misc_feature 1..167: note = source = chr18:59640487-59640653; Gene: RNF152 (Intergenic)
  source 1..167: mol_type = genomic DNA
cggtccatagcacctgccgaatcagagatgctgagggtggtgcccagttaaaactgtgcttcaggggattctgacacaccctaaaatttgagaaccgctgacctaaaaatgaatagattgttcttgctttgataccggagttctgaaggactgggttcagtaatacg

SEQ ID NO: 6296 - DNA, 168 bp, Homo sapiens
  misc_feature 1..168: note = U/M: U (0.21:0.82) in Lung Alveolar + Bronchial cells
  misc_feature 1..168: note = source = chr10:113681047-113681214; Gene: GPAM (Intergenic)
  source 1..168: mol_type = genomic DNA
cggtggttcacgtctgtaatcccaacactttgggaggtcaaggcaggtagatcacttgaggtcaggagttcaagccccacctggccaacatggtgaaaccccacctctactaaaaaacacaaaaatcagcctgacacggtggtgcacgtctgtagtcccaactactcg

SEQ ID NO: 6297 - DNA, 207 bp, Homo sapiens
  misc_feature 1..207: note = U/M: U (0.22:0.83) in Lung Alveolar + Bronchial cells
  misc_feature 1..207: note = source = chr1:99397142-99397348; Gene: LPPR5 (intron)
  source 1..207: mol_type = genomic DNA
cggggctggagtagtcttcaagcagaggtaagactacttaccttcaagagcatgcctgaaggaggagctgaaaatgactcagtgtgtcagtctggaggttgtgtgggtcgggacgggggtgagtacagagggaagtagcaggaattaggccagagaggttaacgggggccaggttcaaaaagctttgtgtgccaagtgaaggattcg

SEQ ID NO: 6298 - DNA, 229 bp, Homo sapiens
  misc_feature 1..229: note = U/M: U (0.23:0.84) in Lung Alveolar + Bronchial cells
  misc_feature 1..229: note = source = chr4:4263169-4263397; Gene: TMEM128 (Intergenic)
  source 1..229: mol_type = genomic DNA
cgtaggattgtgtctttgttcagaaaaatagttacacagtaactgtaaactagagtgctacttcaaaaattgaagtggatttcttcatttaaatgctgtatggtttggcctcgctgattcttctttgctgcagtccagtcacttagagagctttgtgcatgaaaaagtaaggcgtcagatcctgtctgttgggccagtgcctcggacaaccaatggtagacactgctcg

SEQ ID NO: 6299 - DNA, 259 bp, Homo sapiens
  misc_feature 1..259: note = U/M: U (0.21:0.82) in Lung Alveolar + Bronchial cells
  misc_feature 1..259: note = source = chr5:133260671-133260929; Gene: C5orf15 (Intergenic)
  source 1..259: mol_type = genomic DNA
cgtacattcatctgcctctcgatcagtggaaatgcatcctcccatttgctgatgctgaaagcctcctcactgcctccctctctctcactccatattcaagtggtcagcaaacatttcaaaatacataccgtgtcggactccttctgccccctttaccgtttctcacctggattctgctgtaccagcctccaacagggccccctccccgcaggctgttcatcacaacacagagtgctcttgtcaaaatgtgggtgagacg

SEQ ID NO: 6300 - DNA, 326 bp, Homo sapiens
  misc_feature 1..326: note = U/M: U (0.26:0.87) in Lung Alveolar + Bronchial cells
  misc_feature 1..326: note = source = chr17:15795454-15795779; Gene: ADORA2B (Intergenic)
  source 1..326: mol_type = genomic DNA
cgtgagccactgcgcctggccaaatattttttttgagacagagtttgagatagagtttcactcttgtcgcccaggctggagtgcagtggcgtgatctaggctcactgcaacctctgcctcccagggtcaagcgattctcctgcctcagccttctgagtagctggattacagacaggcaccaccacgcctgactaatttttgtatttttaatagagacagggtttttgccctgttgaccaggctggtctcagattccagacctcaggtgatccacccgccttggccttccaaagtgctgggattacaggtgttagccaccgtgctcg

SEQ ID NO: 6301 - DNA, 381 bp, Homo sapiens
  misc_feature 1..381: note = U/M: U (0.22:0.83) in Lung Alveolar + Bronchial cells
  misc_feature 1..381: note = source = chr3:157003040-157003420; Gene: VEPH1 (intron)
  source 1..381: mol_type = genomic DNA
cgttggctcaatccagactctgtaatcagccaacaatctgtgcttcacaaaggctggcgtcctaactgccagcttctgccatccgcaccttttccgtggggtaatacattttaattggtacttctctgagagccctacacatctccatctggccaaataaacatacttttactattcagcctcaacatcttggcagttaacaagaggacagacttgccacaatgggtaatctttaagatgcataaaatcctaaaattaaaggaccaggtacaggtggtataatcaatggctgcctagaagatggctcatctacaaagtggctttgtgttccacagtctttttaacactgctcttgtgatcctaaatgcagttcctgagccg

SEQ ID NO: 6302 - DNA, 218 bp, Homo sapiens
  misc_feature 1..218: note = U/M: U (0.22:0.82) in Lung Alveolar + Bronchial cells
  misc_feature 1..218: note = source = chr12:105872895-105873112; Gene: C12orf75 (Intergenic)
  source 1..218: mol_type = genomic DNA
cgggctgggggacggtcaggtctttcccttcccacgaggccatatttcagactatcacatggggagaaaccttggacaatacctggctttcctaggcagaggtccctgcggccttcgcagtttttgtgtccctgggtacttgagattagggagtggtgatgactcttaaggagcatgctgccttcaagcatttgtttaacaaagcacatcttgcaccg

SEQ ID NO: 6303 - DNA, 236 bp, Homo sapiens
  misc_feature 1..236: note = U/M: U (0.22:0.82) in Lung Alveolar + Bronchial cells
  misc_feature 1..236: note = source = chr10:106544867-106545102; Gene: SORCS3 (intron)
  source 1..236: mol_type = genomic DNA
cggctgcaatggcggctttgtggaatagaaaggcgggaaaggtggggaaaagattgagaaatcggatggttgccgtgtctgtgtagaaagaagtagacatgggagacttttcattttgttctgcactaagaaaaattcctctgccttgggatcctgttgatctgtgaccttacccccaaccctgtgctctctgaaacatgtgctgtgtccactcagggttaaatggattaagggcg

SEQ ID NO: 6304 - DNA, 101 bp, Homo sapiens
  misc_feature 1..101: note = U/M: U (0.24:0.83) in Lung Alveolar + Bronchial cells
  misc_feature 1..101: note = source = chr4:8953961-8954061; Gene: LOC650293 (Intergenic)
  source 1..101: mol_type = genomic DNA
cgcacagatcacttgagtccaggagtttgagacccgcctggccaacatggtgaaaccccgtctctacggaaaacacaaacaatgagtcaggcgtggtgacg

SEQ ID NO: 6305 - DNA, 334 bp, Homo sapiens
  misc_feature 1..334: note = U/M: U (0.28:0.87) in Lung Alveolar + Bronchial cells
  misc_feature 1..334: note = source = chr10:65836171-65836504; Gene: REEP3 (Intergenic)
  source 1..334: mol_type = genomic DNA
cgactccttttcttttcttacatactttcgattagtcagcttcttccaggggcccagcacttttctggatagctccaagcccccttgaggctctgagtgtttcctcacttgattttcaaggacccctagaggcctcgaatgagtgcggctgtggcaacttcaatttccttagagtggagaaactttaagacccaaaagcctcccttttgctgatttagactctgtttataacataattttggtgaaatattctgcaagcaaatctttctctttgttcttcctaccagctggaggatatgtacatagagtaccatttcccaagtcatgtgttacg

SEQ ID NO: 6306 - DNA, 422 bp, Homo sapiens
  misc_feature 1..422: note = U/M: U (0.34:0.93) in Lung Alveolar + Bronchial cells
  misc_feature 1..422: note = source = chr1:65037436-65037857; Gene: CACHD1 (intron)
  source 1..422: mol_type = genomic DNA
cgtccttcatttatgcagcaaacatttttctgagtttctgcatagtgtgccaggctctggcccaggtcacaaggttggtttgtgacaagatattatttgcattgggtctggagaagagagtctgggctctgtgaaatttcaggttcccagagcctttctgacctatccatccccattgtctagcggcctcccttttatttgaaatgcgtctatgttacacttagtgtttataagttatgcacagatatttgttcttcaagtaagagttttatgtaggaagtgactgggtttgcttttcttttctacagttgagtgtagaaagcctggtctttcacaggccaccagagaattcccaagttcacgaacccatagtattttcccctttccctcgtgattaatattctacacaaaaagttgtgacg

SEQ ID NO: 6307 - DNA, 118 bp, Homo sapiens
  misc_feature 1..118: note = U/M: U (0.26:0.84) in Lung Alveolar + Bronchial cells
  misc_feature 1..118: note = source = chr7:156903800-156903917; Gene: UBE3C (Intergenic)
  source 1..118: mol_type = genomic DNA
cgataggtcattttaaggactttattagtcgctgtttggtttacatccaataaggacaagggaacaaccacaggtgctgacccagggcacggttggggccacgcaggactggttaacg

SEQ ID NO: 6308 - DNA, 218 bp, Homo sapiens
  misc_feature 1..218: note = U/M: U (0.32:0.9) in Lung Alveolar + Bronchial cells
  misc_feature 1..218: note = source = chr19:46963970-46964187; Gene: PNMAL1 (Intergenic)
  source 1..218: mol_type = genomic DNA
cgctttgtcactcaggctcaagtgcagtggcgtgatcgcagctcaccacaacctccacctcccaggttccagcgattctccagcctcagcctgccaagtaacggggattacaggagcccgccaccatgcccagctaattttcgtatttttagtagagacggggtttcaccatgttggccaggctgctctcgaactcctgtcctcaagtgatcctcccg

SEQ ID NO: 6309 - DNA, 337 bp, Homo sapiens
  misc_feature 1..337: note = U/M: U (0.28:0.86) in Lung Alveolar + Bronchial cells
  misc_feature 1..337: note = source = chr4:150770095-150770431; Gene: DCLK2 (Intergenic)
  source 1..337: mol_type = genomic DNA
cgcccaacaggggcagactgacacctcacatggccaggtactcccacagacctgcagctaacggtattgtctgtgagaaggaaaactaacaaacagaaaggacatccacaccaaaaacccatctgtacatcaccatcatcaaagaccaaaagtagataaaaccacaaagatgggaaaaaaaacagagcagaaaaaatggaaactctaaaaagcagagtgcctctcctcctccaaaggaacgcagttcctcaccagcaacggaacaaagctggacggagaatgactttgacgagctgagagaagaaggcttcagacgatcaaattactctgagctacg

SEQ ID NO: 6310 - DNA, 234 bp, Homo sapiens
  misc_feature 1..234: note = U/M: U (0.21:0.78) in Lung Alveolar + Bronchial cells
  misc_feature 1..234: note = source = chr1:18301849-18302082; Gene: IGSF21 (Intergenic)
  source 1..234: mol_type = genomic DNA
cggctcccagaagatccatctgcctcagttgtccgctcagcctcctgcctcccaaagaggacagagggccttttgtgtcaccaatgagctggcaagggtcctgcattccaggagggaagggctaagtgcctgaaagtgtgtacacatattcacactcttgcattcttacagagtcagaagcatagatgcacacacagcaacgcaaacacgggcacacaaacacacaaaggcacg

SEQ ID NO: 6311 - DNA, 368 bp, Homo sapiens
  misc_feature 1..368: note = U/M: U (0.28:0.85) in Lung Alveolar + Bronchial cells
  misc_feature 1..368: note = source = chr11:60166518-60166885; Gene: MS4A14 (intron)
  source 1..368: mol_type = genomic DNA
cgcgtcttcaatggcatcctaggtgctgagactgagaatactggaaaacagctcctctctgagagaagtggtgaattgttcttagatttagacagtttgtcatctaactgggagactagacatgaaaaagtcaaaagtaaccccaaatatttgttcctacacttgtgctaagtgctctaagaggagagttccaggtgcgatgtgagggtttaatagaggactcacctgaccatggaggtcaggcaagtgctttctgcgtagctgctcactaggcgaagtggaaggaaagcatccctggcaaagataaagcatgagccaagggcttgatgtgggaaagagtaaccaaaagaagaccaatgaatctatcg

SEQ ID NO: 6312 - DNA, 195 bp, Homo sapiens
  misc_feature 1..195: note = U/M: U (0.24:0.8) in Lung Alveolar + Bronchial cells
  misc_feature 1..195: note = source = chr5:176532975-176533169; Gene: FGFR4 (Intergenic)
  source 1..195: mol_type = genomic DNA
cgccagccctttccggggcccccagtgccagcctcacgttctcgcgctggtactcgggggcgcagcctgacatggccctattgacctcaccaccggcccaaggcacatgctgtgggctccttgtagttctggagcctccaggcccccctggaacccttcaggactcctaagtggactcattgggaactgtctccg

SEQ ID NO: 6313 - DNA, 264 bp, Homo sapiens
  misc_feature 1..264: note = U/M: U (0.3:0.85) in Lung Alveolar + Bronchial cells
  misc_feature 1..264: note = source = chr11:123994004-123994267; Gene: VWA5A (intron)
  source 1..264: mol_type = genomic DNA
cgattgacagggcccatgtgttttggcgagcctctctcactctgtctcttcatactctcttaccttcaggaaacactgattttgctgctgaagagtttacctataggctgttatttcaacatctatggatttggctcttcctatgaggcatgctttccgtaagtttctggaaagacaatagggagtacaaaacgagactttaaagaaagggactaaattgttaaaggggttactgcggagttgactttggcattgggggtttcg

SEQ ID NO: 6314 - DNA, 297 bp, Homo sapiens
  misc_feature 1..297: note = U/M: U (0.31:0.86) in Lung Alveolar + Bronchial cells
  misc_feature 1..297: note = source = chr7:27546756-27547052; Gene: HIBADH (Intergenic)
  source 1..297: mol_type = genomic DNA
cggggtaatttgatcgtctgaagccttcttctctcagctcgtcaaagtctctccatccagctttgttccgttgctggtgaggaactgcattcctttagaggaggagaggcgccctgctttttagagtttccagtttttctgctctgttttttccccatctttgtggttttatctacttttggtctttgatgatggtgatgtacagatgggtttttggtgtggatgtcctttctgtttgttagttttccttctaacagacaggaccctcagctgcaggtctgttggagtaccctgccg

SEQ ID NO: 6315 - DNA, 292 bp, Homo sapiens
  misc_feature 1..292: note = U/M: U (0.3:0.84) in Lung Alveolar + Bronchial cells
  misc_feature 1..292: note = source = chr5:158243769-158244060; Gene: EBF1 (intron)
  source 1..292: mol_type = genomic DNA
cgaaaaactaaatcaataatacgaagccatctgaaaaaaaaagaggagaaaggactcttaaaatgtttgactttctatgaagaacacatgccctattgatacaataaggagtaattagggggacagctccaaagcacagccaactccctggtgagtttccaaagtccagcagcgaagagcaaagttataagtaggtctgagcaaacttgccctgggctttcaccggatctgaggagcccatgtaattgaaactgagttcatcaaagccctgcttgacctcctccccacttcg

SEQ ID NO: 6316 - DNA, 388 bp, Homo sapiens
  misc_feature 1..388: note = U/M: U (0.32:0.86) in Lung Alveolar + Bronchial cells
  misc_feature 1..388: note = source = chr1:162436081-162436468; Gene: UHMK1 (Intergenic)
  source 1..388: mol_type = genomic DNA
cggccaccaccccgtctgggaggtgtgcccagcagctcattgagaacgggccatgatgacaatggcggttttgtggagtagaaaggggggaaaggtggggaaaggattgagaaatcggatggttgccgtgtctgtgtggagagaggtagacatgggagactttttgttttgctctgtactaagaaaaattcttatcctgttgatctgtgaccttgcccccaaccctgtgctctctgaaacatgtgctgtgtccactcagggttaaatggattaagggcggtgcaagatgtgctttgttaaacagatgcttgaaggcagcatgctccttaagagtcatcaccactccctaatctcaagtacccagggacacaaacactgcggaaggccg

SEQ ID NO: 6317 - DNA, 421 bp, Homo sapiens
  misc_feature 1..421: note = U/M: U (0.28:0.82) in Lung Alveolar + Bronchial cells
  misc_feature 1..421: note = source = chr3:180857211-180857631; Gene: SOX2-OT (intron)
  source 1..421: mol_type = genomic DNA
cgggatgcatggttcttctacttttcgatgccctactatggtaattgcttacttgtctgtcttcccaactagctggtgagccatttgataatggagattatttcttattccaagtgctcaacagagtgctgtcaagtgtttgtttaatgttaaacaaagaagctccctctagcccttgaggagtggcagatttacttagtctctctactctagagagtgaatacatccttcaggtgcatttgatcatttcctttcctttgcttaatctggatgttggcatatatatctatacacacacacgcatatgatcttccttccatgtttctccaatgtgtatgaggctaattacacgattctatttagcgagatctgaaccaccaacaaaagagaatcaggctgcttctactaatgtttagatccg

SEQ ID NO: 6318 - DNA, 320 bp, Homo sapiens
  misc_feature 1..320: note = U/M: U (0.26:0.79) in Lung Alveolar + Bronchial cells
  misc_feature 1..320: note = source = chr7:154961046-154961365; Gene: LOC100128264 (Intergenic)
  source 1..320: mol_type = genomic DNA
cggagacctgggcaaggccagtagtgccaggtaacacagacaccagcagcatccagggctgaggttctgggggtccgccagggactgggactgcttcggctcaaaggcagccaggcaggggccgggaaaaaggagcaagtggtgccctgggttactacagactttgcccacatgtctgcaggggcagggacccagtgcacacctcccggatgtccaggagcagacacagagttcagtggatgggctcctccgacaccctgagctgctcaggtgaagggagggtttgtgtgcaggtgaagcaggcccccgccaacctgacg

SEQ ID NO: 6319 - DNA, 164 bp, Homo sapiens
  misc_feature 1..164: note = U/M: U (0.34:0.86) in Lung Alveolar + Bronchial cells
  misc_feature 1..164: note = source = chr16:89361007-89361170; Gene: ANKRD11 (intron)
  source 1..164: mol_type = genomic DNA
cggagcgagacccccatgtgccacagcccatggctcaacaatgcctgctctccattccaacccagcgacaccatggtctgagagcagctgagcgggtccttgacgtgcacacacacagcccgtacctgtacctgcactgtcaggcaccacacaagtgggtcccg

SEQ ID NO: 6320 - DNA, 161 bp, Homo sapiens
  misc_feature 1..161: note = U/M: U (0.34:0.85) in Lung Alveolar + Bronchial cells
  misc_feature 1..161: note = source = chr20:59700988-59701148; Gene: CDH4 (Intergenic)
  source 1..161: mol_type = genomic DNA
cgccgtccctagaagcaggattgaagtcccgtctccacacggccacggcaggaggggcggcctgggctcagatgagtggctccagattggacacacacagagcttgctttgccatgggtatgtttacgtgtcagttcccacccatgcactcaggaaaagcg

SEQ ID NO: 6321 - DNA, 117 bp, Homo sapiens
  misc_feature 1..117: note = U/M: U (0.23:0.73) in Lung Alveolar + Bronchial cells
  misc_feature 1..117: note = source = chr7:1412878-1412994; Gene: MICALL2 (Intergenic)
  source 1..117: mol_type = genomic DNA
cgggcagggcagtggcctggggaggttggtccttctaactctgggacggagaaacatgagaatcatgtcaatcatatcacgaggtacttgttgatcgttattgcatgatcacctccg

SEQ ID NO: 6322 - DNA, 119 bp, Homo sapiens
  misc_feature 1..119: note = U/M: U (0.29:0.79) in Lung Alveolar + Bronchial cells
  misc_feature 1..119: note = source = chr10:50374944-50375062; Gene: C10orf128 (exon)
  source 1..119: mol_type = genomic DNA
cggaagagtcgtcgtcaaataagtgcctcctgatcatgcagatcttcagggccaggaagccagcagatatggcgacacccacagcagtcccgatgagggcgtacttgaaatctgaaacg

SEQ ID NO: 6323 - DNA, 166 bp, Homo sapiens
  misc_feature 1..166: note = U/M: U (0.32:0.82) in Lung Alveolar + Bronchial cells
  misc_feature 1..166: note = source = chr19:10394627-10394792; Gene: ICAM1,ICAM1 (intron,exon)
  source 1..166: mol_type = genomic DNA
cgcaggagggggaatgaaatgccccagagaagggcttcgggacgtccatccctgtctgctcacacctttcttctctccctagtcctgccagcgactcccccacaacttgtcagcccccgggtcctagaggtggacacgcaggggaccgtggtctgttccctggacg

SEQ ID NO: 6324 - DNA, 235 bp, Homo sapiens
  misc_feature 1..235: note = U/M: U (0.29:0.79) in Lung Alveolar + Bronchial cells
  misc_feature 1..235: note = source = chr12:48107264-48107498; Gene: ENDOU (intron)
  source 1..235: mol_type = genomic DNA
cgtcaagaaacatgtgggttcaatcaacaaatgtgttcggctgttaattcaatgattatctatgggatgcctattttgtgccaaatccagatctaaaggctgaggattcagctgggaatagcaaggacacggtctctatctatattacattccactggaggagtcaaataataagtaaacaataagaaatatgatttcagatcagtgctatgaagcaaagtagcccgtaatgacg

SEQ ID NO: 6325 - DNA, 488 bp, Homo sapiens
  misc_feature 1..488: note = U/M: U (0.34:0.84) in Lung Alveolar + Bronchial cells
  misc_feature 1..488: note = source = chr11:46918967-46919454; Gene: LRP4 (intron)
  source 1..488: mol_type = genomic DNA
cgcagagggggatttggcagggtcataggacaatagtggagggaaggtcagcagataaacaagtgaacaaaggtctctggttttcctaggcagaggaccctgcggccttccgcagtgtttgtgtccctgggtacttgagattagggagtggtgatgactcttaacgagcatgcggccttcaagcatctgtttaacaaagcacatcttgcaccgcccttaatccatttaaccctgagtggacacagcacatgtttcagagagcacagggttgggggtaaggtcacagatcaacaggatcccaaggcagaagaatttttcttagtacagaacaaaatgaaaagtctcccatgtatacttctttctacacagacacggcaaccatccgatttctcaatcttttccccacctttccctcctttctattccacaaaaccgccattgtcatcatggcccgttctcaatgagctgttgggtacacctcccagacg

SEQ ID NO: 6326 - DNA, 311 bp, Homo sapiens
  misc_feature 1..311: note = U/M: U (0.3:0.78) in Lung Alveolar + Bronchial cells
  misc_feature 1..311: note = source = chr2:114344227-114344537; Gene: WASH2P (intron)
  source 1..311: mol_type = genomic DNA
cgagaggcacacattctgctaagagctttttcctgactcccctaactccaagagggatttgtcactccttagctttgtactcatgactggagtagaatgaatttaatttgagtttagttgtttttgagactctccctggctagtgtagtgtcttattcgtctttgttgtgatcatggcctgcacctaacagatgatcagtagatgtttgcagacagaaagtaaaccactcatcaggtgtattcagtcccgttcttgaacgggcttgctgcctcctttttgaggagatctgtgtatgtactcttctttcacg

SEQ ID NO: 6327 - DNA, 310 bp, Homo sapiens
  misc_feature 1..310: note = U/M: U (0.1:0.91) in Lung Alveolar + Bronchial cells
  misc_feature 1..310: note = source = chr8:111833914-111834223; Gene: KCNV1 (Intergenic)
  source 1..310: mol_type = genomic DNA
cggcaaagtctcaggatacaaaatcaatgtgcaaaaatcacaagcattcctatacaccaataatagacaaaaagagagccaaatcatgagtgaaccgcgattcacaatgtgcaaaaatcagaagcattcctatacgccaataatagacaaacagccaaatcatgagtgaaccgcaattcacaattgctacaaagagaataaagtacctaggaatacaacttacaagggatgtgaaggacctcttcaagaagaactacaaaccactgctcaaggaagtaagagagtgtgggctgcaagccacccaggtgcc

SEQ ID NO: 6328 - DNA, 160 bp, Homo sapiens
  misc_feature 1..160: note = U/M: U (0.08:0.85) in Lung Alveolar + Bronchial cells
  misc_feature 1..160: note = source = chr20:51000919-51001078; Gene: ZFP64 (Intergenic)
  source 1..160: mol_type = genomic DNA
cggtgcggctgtgttccaatagaactttattcataaaacaagtggcaggccggatctggcttcacctgccacggtatgctggctcctgttctgaagcatatgatgcagtttcatcgaattgtcctagtgggtttggaggctgtctgtaactactcttccg

SEQ ID NO: 6329 - DNA, 234 bp, Homo sapiens
  misc_feature 1..234: note = U/M: U (0.2:0.84) in Lung Alveolar + Bronchial cells
  misc_feature 1..234: note = source = chr3:61378641-61378874; Gene: FHIT (Intergenic)
  source 1..234: mol_type = genomic DNA
cgatcattcttgggtgtttctcggagagggggatttggcagggtcataggacaatagtggagggaaggtcagcagataaacatgtgaacaaaggtctctggtttacctaggcagagggccctgccgccttccgcagtgtttgtgtccctgggtacttgagattagggagtggtgatgactcttaaggagcacgctgccttcaagcatctgtttaacaaagcacatcttgcaccg

SEQ ID NO: 6330 - DNA, 417 bp, Homo sapiens
  misc_feature 1..417: note = U/M: U (0.05:0.86) in Lung Alveolar + Bronchial cells
  misc_feature 1..417: note = source = chr14:64369053-64369469; Gene: SYNE2 (intron)
  source 1..417: mol_type = genomic DNA
cgggaagcagaggttgcagtgagccgagattgcaccactgcactccagcctgggtgacagaacgagactcctcaaaaaaaaaaaaaaaaaaaaaaagaatagttttatttattttagtactaaaccctggctttgttacataattgtggtaacttttatttgaaaagaaaaagtaaggccagaaggagtacccaggaaagctcttctgggctggaatttacctgggcacagccgctgtgttctccttagaggagtcaaaacacagtgatagatttcggttgctagagacccgggagactcaatctagcccttagctaaatctagcccttagccctcactcctctttctttcctttttgtttttttcttttttttttggagacaaggtcttgctttgtcacccaggctggagtgcagc

SEQ ID NO: 6331 - DNA, 94 bp, Homo sapiens
  misc_feature 1..94: note = U/M: U (0.07:0.86) in Lung Alveolar + Bronchial cells
  misc_feature 1..94: note = source = chr20:60485351-60485444; Gene: CDH4 (exon,intron)
  source 1..94: mol_type = genomic DNA
cgagctgggctgacacggtgtgttctgtttgtgaacactcgttgagctgcacatatgctacgtgcacttctctgtgcatatttacacttaacac

SEQ ID NO: 6332 - DNA, 178 bp, Homo sapiens
  misc_feature 1..178: note = U/M: U (0.07:0.84) in Lung Alveolar + Bronchial cells
  misc_feature 1..178: note = source = chr9:88836212-88836389; Gene: C9orf153 (exon)
  source 1..178: mol_type = genomic DNA
cgtccaaaccacttctcacgttagcagattaaatcggaccttttgctctgtattaacggcttaattttacaatataccttcatgtgtgttgtacacactcacttcagatgttctattgggtacttggcttctttactttttgtgtattaaatcaatgctctcaaaagcaaaaatctac

SEQ ID NO: 6333 - DNA, 140 bp, Homo sapiens
  misc_feature 1..140: note = U/M: U (0.12:0.88) in Lung Alveolar + Bronchial cells
  misc_feature 1..140: note = source = chr20:23283452-23283591; Gene: NXT1 (Intergenic)
  source 1..140: mol_type = genomic DNA
cgatgatggagaggttgaaggaaagtagtgtgtacagtgtggcgatgatggagaggttgaaggaaagtagtgtgtacagtgtggcgatgatggagaggttgaaggagaagggactgacgatagcttctcagggtgcttcc

SEQ ID NO: 6334 - DNA, 340 bp, Homo sapiens
  misc_feature 1..340: note = U/M: U (0.18:0.94) in Lung Alveolar + Bronchial cells
  misc_feature 1..340: note = source = chr1:28854250-28854589; Gene: RCC1 (intron)
  source 1..340: mol_type = genomic DNA
cgatggctcacgcctgtaatcccgcactttgggaggccaaggtgggtggatcatctgaggtcaggagttcaagaccagcgggaccaacatggagaaaccccatctctactaaaaatacaaaataagccgggcgtggtggcacatgcctgtaatcctagctactccagaggctgaggcaggagaatcacttgaacctgggaggtagaggttgtggtgagccgagattgcgccatggcactccagcctgggcaataagaacaaaactctgcttcaaaaaaaaaaaaaaaaaaacatgtaatcggctgtacgcagtggctcacgcctgtaatcccaggacttc

SEQ ID NO: 6335 - DNA, 100 bp, Homo sapiens
  misc_feature 1..100: note = U/M: U (0.16:0.91) in Lung Alveolar + Bronchial cells
  misc_feature 1..100: note = source = chr8:134602104-134602203; Gene: ST3GAL1 (Intergenic)
  source 1..100: mol_type = genomic DNA
cgcacgcatgcctgtaatcccagcactttgggagtctgacgcgggcggatcatctgaggtcaggagttcgagatcagcctggtcaacatggtggaacccc

SEQ ID NO: 6336 - DNA, 205 bp, Homo sapiens
  misc_feature 1..205: note = U/M: U (0.08:0.79) in Lung Alveolar + Bronchial cells
  misc_feature 1..205: note = source = chr9:31633242-31633446; Gene: ACO1 (Intergenic)
  source 1..205: mol_type = genomic DNA
cgcaggtcccacctccagccctaaggcggtttttccctatctcagtagatggagcatacaatcgggttttataccgagacattccattgcccaggggcaggcaggagacagatgttttcctcttgtctcaactgcaagaggcattccttcctcttttactaatcctcctcagcacagaccctttacgggtgtcgggctgggggac

SEQ ID NO: 6337 - DNA, 136 bp, Homo sapiens
  misc_feature 1..136: note = U/M: U (0.12:0.92) in Lung Alveolar + Bronchial cells
  misc_feature 1..136: note = source = chr9:95771178-95771313; Gene: FGD3 (intron)
  source 1..136: mol_type = genomic DNA
cggaggctgtagtgagccaagatcactccactacactccaggctgggcaacagagcaagactccatcaaaaaaaaaaaaaaagttttggccaggcgcgatggctcacgcttgtaatcctagcactttgggagaccg

SEQ ID NO: 6338 - DNA, 130 bp, Homo sapiens
  misc_feature 1..130: note = U/M: U (0.06:0.82) in Lung Alveolar + Bronchial cells
  misc_feature 1..130: note = source = chr15:91584200-91584329; Gene: VPS33B (Intergenic)
  source 1..130: mol_type = genomic DNA
cggcgcctggggaaggtgcggaattggaagtgactgcttcgtgggtacggggtttcttttggagggatgaagaggttctgcagtgattagtggtgatggttacacagcactgtgagtgtacttaatgccg

SEQ ID NO: 6339 - DNA, 288 bp, Homo sapiens
  misc_feature 1..288: note = U/M: U (0.16:0.9) in Lung Alveolar + Bronchial cells
  misc_feature 1..288: note = source = chr22:29130426-29130713; Gene: CHEK2,CHEK2 (exon,intron)
  source 1..288: mol_type = genomic DNA
cgagcccagggggcaggggtaggctcctcaggttcttggtcctcaggttcttggtcctcaggaatagaatagagttcctgagtggacactgtctctaaggagctcagtgtcccagagctggagtgagaggactggctggagtttggcatcgtgctggtagaggagctggatatgccctgggactgtgaggaggagccttgggactgggtaacgctgccatggggctgtgaacaggcactgctgccatgagactgctgagcctcaacatccgactcccgagacatcacg

SEQ ID NO: 6340 - DNA, 381 bp, Homo sapiens
  misc_feature 1..381: note = U/M: U (0.23:0.92) in Lung Alveolar + Bronchial cells
  misc_feature 1..381: note = source = chr20:60856661-60857041; Gene: OSBPL2 (intron)
  source 1..381: mol_type = genomic DNA
cgaatcatggagccgtccccacagcccatttcaaacacttccatcgccccaaaggcccaccacacccatttgcagtcaccccccgcctgccccaggggcctccaccgcgcttctcctgttacagagttaccctttccggctgtttgctgtcttgcagcagaaacctgtgtttgtttttctcacagaactggacataagtgtgtgcttcactttaaaccgtgtggattatttggaaaagaacttcacaaggtggaaggacacattcaagacaaaaagtaggtccttgccaagtgttcatggggcaccactacagcctgtgtgtccacgttagaagggctcaggtgctcctgggcctgcgtgtgcctacgtgcatgagacgcg

SEQ ID NO: 6341 - DNA, 168 bp, Homo sapiens
  misc_feature 1..168: note = U/M: U (0.17:0.85) in Lung Alveolar + Bronchial cells
  misc_feature 1..168: note = source = chr14:72265353-72265520; Gene: RGS6 (Intergenic)
  source 1..168: mol_type = genomic DNA
cgctgggttaaccaggctggattgcagtggcacgatcttagctcaatgcaacctctgcctcctgggctcaagtgatcctcccacctcagcctcctgagtggctaggactacaggcacacatcagtatgcctggctaatttttgtacaggcgcgagccaccatgctccg

SEQ ID NO: 6342 - DNA, 198 bp, Homo sapiens
  misc_feature 1..198: note = U/M: U (0.21:0.89) in Lung Alveolar + Bronchial cells
  misc_feature 1..198: note = source = chr21:45895657-45895854; Gene: LRRC3 (Intergenic)
  source 1..198: mol_type = genomic DNA
cggatggatccaccgctgctgacgtactttggtgctgacgtactttggtgccgtgactcggatacattccctagaggtaagagatctctacgctttgccttcatgaatattcctcttgcttcctcccacttcctcccatagccaagggattgtcccatctgcttaagcatttgttcttcatgttaccccgggaggacg

SEQ ID NO: 6343 - DNA, 276 bp, Homo sapiens
  misc_feature 1..276: note = U/M: U (0.18:0.86) in Lung Alveolar + Bronchial cells
  misc_feature 1..276: note = source = chr9:78556526-78556801; Gene: PCSK5 (intron)
  source 1..276: mol_type = genomic DNA
cgatcattatagcaaatccctgtctttaacatttgatagcatttctgagtctttgcaaatcccactagaatgcatacactcttgggagaagcctttcagccttagattagcccttggatccatttatggtgacacgatgattaggagtgtggaagagacctgaagaggcatgtgggtgccgggtccactgtgttctccacctccctgtcctatcggttttgtttccaggtctcctaggtgtctggatggtcagaaaccagagggtcagattgtacg

SEQ ID NO: 6344 - DNA, 234 bp, Homo sapiens
  misc_feature 1..234: note = U/M: U (0.22:0.87) in Lung Alveolar + Bronchial cells
  misc_feature 1..234: note = source = chr22:24210757-24210990; Gene: SLC2A11,SLC2A11 (exon,intron)
  source 1..234: mol_type = genomic DNA
cgtgtctctgtatcccctgggaggcctctttggagcactgcttgcaggtcccttggccatcacgctgggaaggtaagtgcttcctgcataccccctgaatgccctttaatgaggagcgctgcagcctgcaggctgaggaatgtggaagaaggaagaggcccggcaagctccaggcccagatcagctcctcatccagcctcttactctgcctggagtttcaccttgcaagacacg

SEQ ID NO: 6345 - DNA, 411 bp, Homo sapiens
  misc_feature 1..411: note = U/M: U (0.2:0.85) in Lung Alveolar + Bronchial cells
  misc_feature 1..411: note = source = chr21:37780765-37781175; Gene: CHAF1B (intron)
  source 1..411: mol_type = genomic DNA
cggtgccctatggcaaaggctcactatgttctcctcgcccaagatcagaaccaggtccccggggattgcccacaggtaggtggagatgacaggtaggtagaactggagtaagggctgagaacagacagtgccggaatatatgtttttgtgctctgtcacaacattgtccagagaatataactgcagggggaagtattttgcaaaccggacctgaaggctcttgagtttctgttggtgaacagtttgctgaaacagtgacttttctttcctctccctcccttccctgttccccagctggatgtgtggaatctggtgaaaatgtaatgaataccacttatgttttctccaggaagaatcttaaaaggtatgcagtcaaggaaatgtttgaaatgtttacattttttttagacg

SEQ ID NO: 6346 - DNA, 222 bp, Homo sapiens
  misc_feature 1..222: note = U/M: U (0.24:0.87) in Lung Alveolar + Bronchial cells
  misc_feature 1..222: note = source = chr22:25317089-25317310; Gene: SGSM1 (intron)
  source 1..222: mol_type = genomic DNA
cggagtctcactctgttacccgcgctggagtgaagtggcacgatctcagctcactgcaacctccgcctcccaggttcaagtgattctcccgcctcagcctcctgagtagctgggattacagacacgcaccaccacgcccggctaatttttatatttttagtagagacagagttttgccatgttggccaggctagtctagaactcctgacctcaggcgatccg

SEQ ID NO: 6347 - DNA, 233 bp, Homo sapiens
  misc_feature 1..233: note = U/M: U (0.2:0.83) in Lung Alveolar + Bronchial cells
  misc_feature 1..233: note = source = chr3:66053848-66054080; Gene: MAGI1 (Intergenic)
  source 1..233: mol_type = genomic DNA
cgtttaaatattccctttggaaatcttgttaaactcatttgcttcccaaactctttctctttaaaaagaggaaaagataaacttcagctgagcctctgtctcaatgaggctttactcgattagaaaatattgaccagctgcattagcccgtgtcttcttctatggtcaatagagttactttccacaggcgctgaatctgcaatccacaaagtcttagctggtgttaatgaccg

SEQ ID NO: 6348 - DNA, 74 bp, Homo sapiens
  misc_feature 1..74: note = U/M: U (0.22:0.83) in Lung Alveolar + Bronchial cells
  misc_feature 1..74: note = source = chr1:1986186-1986259; Gene: PRKCZ (intron)
  source 1..74: mol_type = genomic DNA
cggcggcctgcaccgacccggctcgcgcccatcccggggtcacccacatttgggtgaacttgaacgagtgcccg

SEQ ID NO: 6349 - DNA, 340 bp, Homo sapiens
  misc_feature 1..340: note = U/M: U (0.27:0.87) in Lung Alveolar + Bronchial cells
  misc_feature 1..340: note = source = chr20:26272462-26272801; Gene: LOC284801 (Intergenic)
  source 1..340: mol_type = genomic DNA
cgctttgaggcctgtggtgaaaaagaaaatatgttcatataatactacacagaatcattctcagaaacttctttgagatgtttgctttcaactcacagagtagaacattccttttcatagagcagttttgaaacactctttttgtagaatttgcaagtggatatttggaacgctttgaggccttctttggaaatctgatatcttcacaaaaactggacagaagcattctcagaaaattctttgcgatatgtgaactcaacttacagagttgaaccgttcttttgatagaggagcttagaaacactctttttatggaatatgcaagtggacatttggagcg

SEQ ID NO: 6350 - DNA, 148 bp, Homo sapiens
  misc_feature 1..148: note = U/M: U (0.26:0.82) in Lung Alveolar + Bronchial cells
  misc_feature 1..148: note = source = chr22:47486098-47486245; Gene: TBC1D22A (intron)
  source 1..148: mol_type = genomic DNA
cggggcttgccacccattcatgctaggaaaggccagcatccgccagctcatgtctccacccggcacacactgagctgggcaggaatgacaaggatataggcacaggagacccagtcccagcccagggagcgctcagacagacggggcg

SEQ ID NO: 6351 - DNA, 356 bp, Homo sapiens
  misc_feature 1..356: note = U/M: U (0.32:0.87) in Lung Alveolar + Bronchial cells
  misc_feature 1..356: note = source = chr22:25093141-25093496; Gene: POM121L10P (Intergenic)
  source 1..356: mol_type = genomic DNA
cggttaggccagcaccactccccatggccttcatttggggtggtggcctcagcgtctctccccagagtagagcccatggcccttgtgacaggaaggtaagttaggaaggcagatctctaagcagttccctgcactagagtctgcgtgactggtcactcccagccaggcaggccattctgcagcatggacatcagaccggggcttgcaagcccagctctatcctcctggctcaggcccctctgaaggcacagagcagcagagctgggtgggtgtcttcattacacaaccctgtgaggacaggagggaaccctgcttacttcccagagctggagcagggcccctgcagacagcagccg

SEQ ID NO: 6352 - DNA, 173 bp, Homo sapiens
  misc_feature 1..173: note = U/M: U (0.36:0.86) in Lung Alveolar + Bronchial cells
  misc_feature 1..173: note = source = chr22:19874916-19875088; Gene: TXNRD2 (intron)
  source 1..173: mol_type = genomic DNA
cggcacagctacatcaagggcaccttgaaggacatgcccctgctgagatggtctccaggatccacaccagtttaagcagcagacagagctgtccatcaccaccaagggcctccacacgggccaatttctgtttgtgtactgtagcaagagggcccagctggacgtcggcagcg

SEQ ID NO: 6353 - DNA, 82 bp, Homo sapiens
  misc_feature 1..82: note = U/M: M (0.66:0.23) in Lung Alveolar + Bronchial cells
  misc_feature 1..82: note = source = chr19:10404606-10404687; Gene: ICAM5 (intron)
  source 1..82: mol_type = genomic DNA
cgtcacggtggaatgtgagtaggggcaccgcggagttaggcaggatctgtgggacaaccccggctggacttcctggcccccg

SEQ ID NO: 6354 - DNA, 189 bp, Homo sapiens
  misc_feature 1..189: note = U/M: M (0.82:0.15) in Lung Alveolar + Bronchial cells
  misc_feature 1..189: note = source = chr5:3602272-3602460; Gene: IRX1 (TTS)
  source 1..189: mol_type = genomic DNA
cggactgcgtcctttgccctcaggcgcgcgcaccgcgggagtccagagcaaattgcccttagatggccgcggccgggcagcggggaggcagctgggagcagcgatgttgggaaacactcgcagcggggctggcctcgggcgcgcgcgagtggggaaaggcctaggagcctggacatcgctgcggatccg

SEQ ID NO: 6355 - DNA, 213 bp, Homo sapiens
  misc_feature 1..213: note = U/M: M (0.82:0.19) in Lung Alveolar + Bronchial cells
  misc_feature 1..213: note = source = chr5:3606284-3606496; Gene: IRX1 (Intergenic)
  source 1..213: mol_type = genomic DNA
cgaagaaggagtctgccttaggcccacggaagtcaccacgtggcctgggactgaggaggcttcaggagcgacctaaaatgttaggattgctctaaatgaggaggcagagaaagggcggccttgaacccgggagggagcaagggatggagctgcgccctgggtggcaagacatggcaagccaggcagctgggacctagagaaggctcggccgcg

SEQ ID NO: 6356 - DNA, 288 bp, Homo sapiens
  misc_feature 1..288: note = U/M: M (0.71:0.15) in Lung Alveolar + Bronchial cells
  misc_feature 1..288: note = source = chr5:3602539-3602826; Gene: IRX1 (Intergenic)
  source 1..288: mol_type = genomic DNA
cggcgcggggccttcagggcgcaggcgactcagcgttgaatgcgtgaaaactgagccagcaaacatttccaaaactgccagcgaggatgtgggctgccgggaaaaacggtctagtggggacagggccgagtcccgaagtcagagccgagtcccgaggtcagagcggccgtcctccgctcgcacccccagcctgtgacccgcccttcccggcttgctcgagacccactggcgccagtgctgcgcgtggggactccgtgcatggccgaagcgagggggaaagtcggggcg

SEQ ID NO: 6357 - DNA, 294 bp, Homo sapiens; identical to SEQ ID NO: 2972
  misc_feature 1..294: note = U/M: M (0.66:0.13) in Lung Alveolar + Bronchial cells
  misc_feature 1..294: note = source = chr5:3594139-3594432; Gene: IRX1 (Intergenic)
  source 1..294: mol_type = genomic DNA

SEQ ID NO: 6358 - DNA, 423 bp, Homo sapiens; identical to SEQ ID NO: 2974
  misc_feature 1..423: note = U/M: M (0.65:0.13) in Lung Alveolar + Bronchial cells
  misc_feature 1..423: note = source = chr5:3606587-3607009; Gene: IRX1 (Intergenic)
  source 1..423: mol_type = genomic DNA

SEQ ID NO: 6359 - DNA, 199 bp, Homo sapiens
  misc_feature 1..199: note = U/M: M (0.7:0.2) in Lung Alveolar + Bronchial cells
  misc_feature 1..199: note = source = chr5:3600389-3600587; Gene: IRX1 (intron)
  source 1..199: mol_type = genomic DNA
cgcgtccacctgtcccctagctgggaatgcagaggcctggctaggtgtggtagcgtggggtgcagcatgagccgggagggtaccaggcagtggccgctgagccctggggctgcgcttaatccctgcttcaatttagaaagccagacaaggccctagggctctcccaagagagctttgccctaccggcgggcctgctacg

SEQ ID NO: 6360 - DNA, 162 bp, Homo sapiens
  misc_feature 1..162: note = U/M: M (0.68:0.23) in Lung Alveolar + Bronchial cells
  misc_feature 1..162: note = source = chr7:113722561-113722722; Gene: PPP1R3A (Intergenic)
  source 1..162: mol_type = genomic DNA
cggctctgaaagagaaaaatgtagttgttgtttgaaagtgttggaaaaaacagacttaagtgtgtgaaaaattatatttttataaaaaataactgaaaatcaaagaggttcactgggagaagcagtaaactaacatttctaatttgtcattcgcgtgcgtcg

SEQ ID NO: 6361 - DNA, 294 bp, Homo sapiens
  misc_feature 1..294: note = U/M: M (0.6:0.18) in Lung Alveolar + Bronchial cells
  misc_feature 1..294: note = source = chr5:43039669-43039962; Gene: ANXA2R (exon)
  source 1..294: mol_type = genomic DNA
cgggaggtggcgccacggctggagggcaggaggatggcggcgttccaaaaggcacccgctgtcacagacctcggtgtcctgctgtctgtcccagggatggagaggactgctccagggaagctgctggagcctgagtctgtcgggttcctctgcctgccccacctcttctacgggtgcctcttgctgcttctgtgtccccggccaactgaactcagtgggcttcgctgtacttggttccaaggtgctctggactccaggagagagtccgttttgccagtagactccgggcagccg

SEQ ID NO: 6362 - DNA, 178 bp, Homo sapiens
  misc_feature 1..178: note = U/M: M (0.66:0.25) in Lung Alveolar + Bronchial cells
  misc_feature 1..178: note = source = chr6:10416561-10416738; Gene: LOC100130275 (TTS)
  source 1..178: mol_type = genomic DNA
cgtccagactggtcagtccgggcttttggactcctcaccggggcctgctgggtcctctggggcttttatccctttcggttttgggatttttttttaagtaagaaaaaaaaaaaagaaaaggacctaatgtgacactaggaaatacagagtaattaattttcctggctgagcttcctcg

SEQ ID NO: 6363 - DNA, 179 bp, Homo sapiens
  misc_feature 1..179: note = U/M: M (0.63:0.26) in Lung Alveolar + Bronchial cells
  misc_feature 1..179: note = source = chr19:18715633-18715811; Gene: CRLF1 (intron)
  source 1..179: mol_type = genomic DNA
cgcagagctggggcctttaaaagttttttctctcctcttttcccaatctggagccactgccgttattaaaaaggaacaccatgtgttttaaaagggaaaagtgtgagattctctgcaagcagggcggaagggtggcctccatcccagggtccccacgggggtccccatctcccgtcccg

SEQ ID NO: 6364 - DNA, 314 bp, Homo sapiens
  misc_feature 1..314: note = U/M: M (0.57:0.24) in Lung Alveolar + Bronchial cells
  misc_feature 1..314: note = source = chr19:18715870-18716183; Gene: CRLF1 (intron)
  source 1..314: mol_type = genomic DNA
cgtaagtagaaacatattgccgaggtgtgagaatcttttatttaatttcttccccccttaaaggaaaaaacacacttacagtgcccccccaccccctacaccttcgcctgctgctctactggctgaaaacaaagcttggcgctcacagtggcactcacaggcgctgcccaccgcctggcagagccgtcaggggccctgggagggcccgaggtagcccctcacctgaaagccaggggagagccaggctttcagcaagtgcccctagaagatgcccggaccctgccccttcccggaggagccctacaggcagcccg

SEQ ID NO: 6365 - DNA, 176 bp, Homo sapiens
  misc_feature 1..176: note = U/M: M (0.55:0.26) in Lung Alveolar + Bronchial cells
  misc_feature 1..176: note = source = chr14:61655239-61655414; Gene: TMEM30B (Intergenic)
  source 1..176: mol_type = genomic DNA
cggctccggggtcctgctgcctctgggacctcctcacccccagacgttgctgtagtgtgtgtgtgtgtcgggggggtgggggggtggtgtggtgtgtgtgtgtgtgtgtgtgtgtgtgtgtgtgtgtgtgtgtgtccggggtcctgctgcctctgggacctcctcacccccagacg

SEQ ID NO: 6366 - DNA, 95 bp, Homo sapiens
  misc_feature 1..95: note = U/M: U (0.06:0.95) in Fallopian + Ovary Epithelium
  misc_feature 1..95: note = source = chr1:28726744-28726838; Gene: PHACTR4 (intron)
  source 1..95: mol_type = genomic DNA
cgtcttggcgcacgcctgtaatcccagctacttgggaggttgaggcaggagaatcgcttgaacctgggagtcggaggttgcagtgagccaagatc

SEQ ID NO: 6367 - DNA, 249 bp, Homo sapiens
  misc_feature 1..249: note = U/M: U (0.05:0.92) in Fallopian + Ovary Epithelium
  misc_feature 1..249: note = source = chr4:186845917-186846165; Gene: SORBS2 (intron)
  source 1..249: mol_type = genomic DNA
cgcacagcgagttttctctttgttccaatccccactccctccgtctctatactggggagctgttttcttcttccttccttctttcttgcctattaaacttttcgctccatgaaaccactccatgtgtgtccgtgtcattaatcctatcggcgtgagaccaagaaccctggtgttcctccagtcatccgagtcgtatcaacttgttcccaccccaaaaatcactctgacaaggcttttcagtgaatacac

SEQ ID NO: 6368 - DNA, 414 bp, Homo sapiens
  misc_feature 1..414: note = U/M: U (0.07:0.93) in Fallopian + Ovary Epithelium
  misc_feature 1..414: note = source = chr2:238519236-238519649; Gene: RAB17 (Intergenic)
  source 1..414: mol_type = genomic DNA
cgtgcagcggctgttgccgccctaatagttttagaggccctcaaaatcacaaactatgctcaatttactctctacattcctcataacttccaaaatctattttcttcctcatacctgacgcatatactttctgctccctggctccttcagctgtactcactctttgttaagtcccacaattaccattgttcctggcccggacttcaatccagcctcccacattattcctgataccacacctgacccccatgactgtatctctctgatccaactgacattcaccccatttccccatatttccttctttcctgttcctcaccctgatcacgcttgatttattgatggcagttccaccaggcctaatcgccacacaccagcaaaggcaggctatgctatagtacaagccactagccc

SEQ ID NO: 6369 - DNA, 148 bp, Homo sapiens
  misc_feature 1..148: note = U/M: U (0.08:0.94) in Fallopian + Ovary Epithelium
  misc_feature 1..148: note = source = chr10:114144318-114144465; Gene: ACSL5 (intron)
  source 1..148: mol_type = genomic DNA
cgcagtagcacaattacagctcactgcagccttgacctccctggctcaagcgatcctcccacctcaggctcccaggtagtggggactaccggcatgcaccgccaagcgaggctaatttttgtattttttgtagagacaggtcctcacc

SEQ ID NO: 6370 - DNA, 220 bp, Homo sapiens
  misc_feature 1..220: note = U/M: U (0.07:0.92) in Fallopian + Ovary Epithelium
  misc_feature 1..220: note = source = chr19:36531822-36532041; Gene: THAP8 (intron)
  source 1..220: mol_type = genomic DNA
cgcaggatgtggaccttgcctacaacaaacaattcagtaaaaagacattttaagacaattggggaaaactgaacatgaactggttataagataattgtaagaaactggtcaggcatggcggttcatgcctgtaatcctagcactttgggaagacgacaaggtgggaggatcgcttgagcccaggagttcgagaccagcctgggcaacatagggagacctc

SEQ ID NO: 6371 - DNA, 302 bp, Homo sapiens
  misc_feature 1..302: note = U/M: U (0.07:0.92) in Fallopian + Ovary Epithelium
  misc_feature 1..302: note = source = chr7:150006090-150006391; Gene: ACTR3C (intron)
  source 1..302: mol_type = genomic DNA
cgtctccccagatgagcgggaaagagtttataccctagcccattctcacactgacacctgcttgcatcgtgagccagacctccaagaaggcatcagggcagttccccgagatgatccccaaagggaataccagacaggcttcccaggtatagctaggtgagattacatggtctcttgcctagttgaagggctaaaaaaggcagcatacaaagctgttagttatgacaagcttaaagaagccactcaaggtaaagatgaaaacccagcccagttcttggcccgcttggtggctacccttagac

SEQ ID NO: 6372 - DNA, 364 bp, Homo sapiens
  misc_feature 1..364: note = U/M: U (0.07:0.92) in Fallopian + Ovary Epithelium
  misc_feature 1..364: note = source = chr13:46444682-46445045; Gene: SIAH3 (Intergenic)
  source 1..364: mol_type = genomic DNA
cgcacgcatccgctgttcctctctactcgccgttgccccatagttctttcttcagtgaaggatctccatcctccctgcttcagatttaaatgcagcctcatacattgtccaaaatcactggaccaaaccctctaggagacataaagaggaaaaaaaatgcttcaaggaatgagttatacatggcaatggattcatacactttacgtagctcctagttcccttccattacgttaattcttcccactcaataacctaattcccttccccacccaccacacacattttctttttttcctggtgaagaagctgattgatgctgaagtcagaattcacccaattttgccatgatctaagtattcaaggc

SEQ ID NO: 6373 - DNA, 130 bp, Homo sapiens
  misc_feature 1..130: note = U/M: U (0.03:0.88) in Fallopian + Ovary Epithelium
  misc_feature 1..130: note = source = chr10:29819520-29819649; Gene: SVIL (exon)
  source 1..130: mol_type = genomic DNA
cgtcagcacagcttaccctgaaaagcaacctcttggcggcgacgctcagcttggctcgttcatccaccttttcttcatctgcaaaaagccacaaattaaaaactggacatcattagagaaggttaagttc

SEQ ID NO: 6374 - DNA, 283 bp, Homo sapiens
  misc_feature 1..283: note = U/M: U (0.05:0.9) in Fallopian + Ovary Epithelium
  misc_feature 1..283: note = source = chr2:11652968-11653250; Gene: GREB1 (Intergenic)
  source 1..283: mol_type = genomic DNA
cgcagcttaagtaattttatgttttacttaggcggatatggcttaagacttatagacaaagataatcaggtcaaaatgaccttctttcagttgttggggcagtgagggtggaggaaccggtgggctggaaagaaagagttatggattctttcaacacactgtccgtccgcctgggaatggagattttgataaagatgaaacttctctgttctggagctgaagcgcaaagcttaaaaaaatggacttaattgggtctgattgttttcctatttgtattcataac

SEQ ID NO: 6375 - DNA, 336 bp, Homo sapiens
  misc_feature 1..336: note = U/M: U (0.03:0.88) in Fallopian + Ovary Epithelium
  misc_feature 1..336: note = source = chr4:1913187-1913522; Gene: WHSC1 (intron)
  source 1..336: mol_type = genomic DNA
cgcctgtaatcccagctcctgggaaggctgaggcatgagaatcgcttgagcccaggagacagaggttgcagtgacccgagatcgcagtactgcactccagcctgggcgacagagcgagacgccatctcaaaaaaaaaaaaaaaaaaaagaaaaaaaaaaagaaagaaagaaattgcataggaagggaggattactaataacatagtactgggacaactggttaattattggtaaaataaaaacagtgagatattcacctctcaacttggaccaaaggatagttcctatggattaaagaaacccataaaaatagtagaaaattcggttatgttatcc

SEQ ID NO: 6376 - DNA, 444 bp, Homo sapiens
  misc_feature 1..444: note = U/M: U (0.04:0.89) in Fallopian + Ovary Epithelium
  misc_feature 1..444: note = source = chr7:148907974-148908417; Gene: ZNF282 (intron)
  source 1..444: mol_type = genomic DNA
cgtggcaaacagcattgacaatttgctggtacacctgggctcagcgtgttctgtttcctctcttcctcatattatccgtttgtaactattccatcttcccctttagaaacaatatcctggcagaagtactaagtgtaaggcttcatgggtgggggaacagggaggtcaggaagacctgttgtgccctgaccaggaaggcctttcattgttttaaacaagtatttatgggctgctacctctgtgccaggcacctacatacctgcggtcctgtgagggacctcctcttagctggcattgcagctggactctgtcgtaggtgagagctctgttatagcagatgtatgtatcaatcagagttctccagagaaacaggacctgtaagggtgtgtgtggaaaagagagatttattttattttaaggaattggcttgtgattgtggaggcc

SEQ ID NO: 6377 - DNA, 121 bp, Homo sapiens
  misc_feature 1..121: note = U/M: U (0.04:0.88) in Fallopian + Ovary Epithelium
  misc_feature 1..121: note = source = chr9:131955855-131955975; Gene: IER5L (Intergenic)
  source 1..121: mol_type = genomic DNA
cggccccattagtagtttggtacacctggttgagagcgcggctctgccagtgactagtgtggaataacagtcaccagggtttgctgggttctcacctgctgctaagcgctcccatctcatc

SEQ ID NO: 6378 - DNA, 242 bp, Homo sapiens
  misc_feature 1..242: note = U/M: U (0.09:0.92) in Fallopian + Ovary Epithelium
  misc_feature 1..242: note = source = chr11:65438546-65438787; Gene: RELA (Intergenic)
  source 1..242: mol_type = genomic DNA
cgctctggaaaacagtatggcggttcctcaaaagaattaaaccagaattaacacatgatccagaaatttcatagtactcaaaactactgaaagcaggaactcaaattgatatctgtacaccagtgttcatagcggcattattcacaatagccaaaaggcggaaacaacccaaatgtccattgacgcatgaccagtgtgatagttaatttcatgtgtcaacttgaccagcccagggaataccc

SEQ ID NO: 6379 - DNA, 128 bp, Homo sapiens
  misc_feature 1..128: note = U/M: U (0.12:0.92) in Fallopian + Ovary Epithelium
  misc_feature 1..128: note = source = chr2:227885834-227885961; Gene: COL4A4 (intron)
  source 1..128: mol_type = genomic DNA
cggcctcccacagtgctgggattacaggcgtgagccactgcgcctggctggagaacactttttaaatggagaacactttttaaaagaatggtttcgcttaaatacttgaataaggatcctgccacccc

SEQ ID NO: 6380 - DNA, 133 bp, Homo sapiens
  misc_feature 1..133: note = U/M: U (0.1:0.9) in Fallopian + Ovary Epithelium
  misc_feature 1..133: note = source = chr17:41407341-41407473; Gene: LINC00854 (Intergenic)
  source 1..133: mol_type = genomic DNA
cgtacagtgtaaaattgtagaactttcatagacttctgaagcctgaccaacaccaactaatgctgtggacgcgtgttcctttggccagtgtcggggccattgatgtaaagcgataatggagacatcagcgccc

SEQ ID NO: 6381 - DNA, 230 bp, Homo sapiens
  misc_feature 1..230: note = U/M: U (0.11:0.9) in Fallopian + Ovary Epithelium
  misc_feature 1..230: note = source = chr22:47227516-47227745; Gene: TBC1D22A (intron)
  source 1..230: mol_type = genomic DNA
cgtgagcatccacagaggaacagagcagcactgtgtttgtgatctttgatttatagctgcctgtgcccagcgggctctggcagaaggctataaataaaattaaaataaatggaaacaatgcacctataaattgggttgcaggaacctccaattaccttttagaggaaatccccaataaaatgctgtttggcaatccgtttgaaagagaaggagcgatagatcatcgtggc

SEQ ID NO: 6382 - DNA, 56 bp, Homo sapiens
  misc_feature 1..56: note = U/M: U (0.08:0.86) in Fallopian + Ovary Epithelium
  misc_feature 1..56: note = source = chr2:239473028-239473083; Gene: LOC151171 (Intergenic)
  source 1..56: mol_type = genomic DNA
cgcatttgcagaaggtcccggagctcggctgctgccccttgcacgtcaagtgtggc

SEQ ID NO: 6383 - DNA, 114 bp, Homo sapiens
  misc_feature 1..114: note = U/M: U (0.08:0.86) in Fallopian + Ovary Epithelium
  misc_feature 1..114: note = source = chr16:55418550-55418663; Gene: IRX6 (Intergenic)
  source 1..114: mol_type = genomic DNA
cggtttgccgtatttcatttagagaccacagcaattagcccttaatgaatagtacacagcgacatataagggagttatttctacacatcgtttatttgccaaatcacaaaaggc

SEQ ID NO: 6384 - DNA, 113 bp, Homo sapiens
  misc_feature 1..113: note = U/M: U (0.12:0.89) in Fallopian + Ovary Epithelium
  misc_feature 1..113: note = source = chr7:54901102-54901214; Gene: SEC61G (Intergenic)
  source 1..113: mol_type = genomic DNA
cgcagcggtggccgcagcggtggcggctcctagagcggtgcgggctggtgctggcggcaggtgggatggaggggggtgggctcttcatgtctctcaacccctgattagaatcc

SEQ ID NO: 6385 - DNA, 356 bp, Homo sapiens
  misc_feature 1..356: note = U/M: U (0.13:0.9) in Fallopian + Ovary Epithelium
  misc_feature 1..356: note = source = chr1:168194169-168194524; Gene: SFT2D2 (promoter-TSS)
  source 1..356: mol_type = genomic DNA
cgggctccacacttctttcacttaatacaatgttttcgaggttcatccacgttgtagcatgtgtcagtactccattcttttttattgcatgggtatgtcacattttatttaccattaatcagttggtggccatttgtattgtttccactctgttgcccaagctagagtgcagtggcttactgtactgacaatcatggcttactgcagccttgacctcctgagtccaagccattcttcctcctcagcctcgcaagtagcttggattacagatgcccgccagcatgcctggctaatttttaagaatgttttgaagagatgaggtctccctatgttgcccaggctggtctggaactccc

SEQ ID NO: 6386 - DNA, 181 bp, Homo sapiens
  misc_feature 1..181: note = U/M: U (0.17:0.92) in Fallopian + Ovary Epithelium
  misc_feature 1..181: note = source = chr4:4760872-4761052; Gene: MSX1 (Intergenic)
  source 1..181: mol_type = genomic DNA
cgaaggctcgtgttttatccgtttttaattaactcattttgaagctttcatacttgtccccaaaatattttcttggcatttcatggtcattgttttccttgggaaggccgccggtgctgcggaggagggtcaccgagcaacatggcttggcatttggacacgcttttgttcccttctcccc

SEQ ID NO: 6387 - DNA, 141 bp, Homo sapiens
  misc_feature 1..141: note = U/M: U (0.19:0.92) in Fallopian + Ovary Epithelium
  misc_feature 1..141: note = source = chr16:89769968-89770108; Gene: SPATA2L (Intergenic)
  source 1..141: mol_type = genomic DNA
cgtgatagtgaattccacgagatccgatggttttataaggggttctcccctttgttcagtgctcattctcgctcctgtcgccctgtgaggagacgccttctgccatgattgtgagtttgctgaggccttccccagccatgc

SEQ ID NO: 6388 - DNA, 325 bp, Homo sapiens
  misc_feature 1..325: note = U/M: U (0.19:0.92) in Fallopian + Ovary Epithelium
  misc_feature 1..325: note = source = chr4:3948578-3948902; Gene: FAM86EP (exon,intron)
  source 1..325: mol_type = genomic DNA
cggcaggcagccagcctccgcaggaccccgactagcgacacgatggcttctgggcaatacagcacgtctacggtgaaatcttcaggttactgaaagggacaagtggaaagttccaggtcatgctgaccacagcagcagggcgaggccagagaggcagcggtcatatgagactattagatgccatttaaacatttgggccattagatggaaaggcaattactacggtgaaaaaggagaacccttagagaaagctgcaaaagaccgaagcaaaagaaaaaaatgtccagactcactggtgttccttaaaaaaccagctctggttttc

SEQ ID NO: 6389 - DNA, 95 bp, Homo sapiens
  misc_feature 1..95: note = U/M: U (0.16:0.88) in Fallopian + Ovary Epithelium
  misc_feature 1..95: note = source = chr16:56828732-56828826; Gene: NUP93 (intron)
  source 1..95: mol_type = genomic DNA
cgggaggctgaggcaggagaatggcttgaacccgggaggtggagcttgcagtgagccgagatcgtgccattgccctccagcctgggcgacagagc

SEQ ID NO: 6390 - DNA, 182 bp, Homo sapiens
  misc_feature 1..182: note = U/M: U (0.13:0.85) in Fallopian + Ovary Epithelium
  misc_feature 1..182: note = source = chr18:71680167-71680348; Gene: FBXO15 (Intergenic)
  source 1..182: mol_type = genomic DNA
cgtcttaaaaaaaaataaaaataaaaaatgaaggggcagtttttggctcccataatgatgtaggacaggtgagcccaaaattggggctgaccgggggaggccttggctttgcctaggaaagaattcaaaggcggacagtgttgtaaacaggaactttcactgaagtggccgtgcacagccgc

SEQ ID NO: 6391 - DNA, 263 bp, Homo sapiens
  misc_feature 1..263: note = U/M: U (0.19:0.91) in Fallopian + Ovary Epithelium
  misc_feature 1..263: note = source = chr4:83707670-83707932; Gene: SCD5 (intron)
  source 1..263: mol_type = genomic DNA
cggccaggcgcagtggctcatgcttgtaatgccagcactttgggaagccgaggtgggcggatcacctgagttcaggagttcgagaccagcctggccaacatggtgaaactactaaaaatataaaaattagctcggcatggtggtgcatgtctgtagtcccagttactggggaggctgaggcaggagaatcgcttgaacccagaaggcagaggttgcagtgagccgagatcacaccattgcactccagcctgggggacaagagc

SEQ ID NO: 6392 - DNA, 119 bp, Homo sapiens
  misc_feature 1..119: note = U/M: U (0.24:0.91) in Fallopian + Ovary Epithelium
  misc_feature 1..119: note = source = chr5:16981676-16981794; Gene: MYO10 (Intergenic)
  source 1..119: mol_type = genomic DNA
cgtctgtagtcccagctactggggaggctgaggcaggagaatggcgtgaacccaggacgtggagcttgcagtgagccgagattgcgccactgcactccatccagcctgggcaacagagc

SEQ ID NO: 6393 - DNA, 183 bp, Homo sapiens
  misc_feature 1..183: note = U/M: U (0.18:0.85) in Fallopian + Ovary Epithelium
  misc_feature 1..183: note = source = chr10:3023582-3023764; Gene: PFKP (Intergenic)
  source 1..183: mol_type = genomic DNA
cgtgtccatcgctaggtcctctactgtgggaccagtgcgtgataagtgaagagtctttcaactctctccaaaagccgaggcaccagagggcacagcgcagagcaggcaggaagcccctgaacagtgattggcgctggaggtccacgattcattcacaaggcgttgcagggcagcgggatgggc

SEQ ID NO: 6394 - DNA, 105 bp, Homo sapiens
  misc_feature 1..105: note = U/M: U (0.24:0.88) in Fallopian + Ovary Epithelium
  misc_feature 1..105: note = source = chr3:125643874-125643978; Gene: FAM86JP (exon)
  source 1..105: mol_type = genomic DNA
cgggagcaccagcgggctcctgaggtctatgtggcctttactgtccgcaacccagagacatgccagctgttcaccaccgagctaggtgagcccccatgcccaccc

SEQ ID NO: 6395 - DNA, 104 bp, Homo sapiens
  misc_feature 1..104: note = U/M: U (0.25:0.88) in Fallopian + Ovary Epithelium
  misc_feature 1..104: note = source = chr8:41555375-41555478; Gene: ANK1 (intron)
  source 1..104: mol_type = genomic DNA
cgcccacccagcgccaccaatgttgcaccattatgaggcgtccaagcgtggaatgccagttggacagtgagtggcatgtgagctattagtgcctattgtgctac

SEQ ID NO: 6396 - DNA, 156 bp, Homo sapiens
  misc_feature 1..156: note = U/M: U (0.21:0.84) in Fallopian + Ovary Epithelium
  misc_feature 1..156: note = source = chr14:93942499-93942654; Gene: UNC79 (intron)
  source 1..156: mol_type = genomic DNA
cgcttcttttgcatagactttgagagccgctgcactaagaccggaggctgtgtcttgctgctgggtctgggtggagcacaggaagagcactaggcaacggttttgtcgcagttcaactgctaactctcaggtgatcctgaacaatcacctctctcc

SEQ ID NO: 6397 - DNA, 198 bp, Homo sapiens
  misc_feature 1..198: note = U/M: U (0.26:0.89) in Fallopian + Ovary Epithelium
  misc_feature 1..198: note = source = chr18:3363758-3363955; Gene: TGIF1 (Intergenic)
  source 1..198: mol_type = genomic DNA
cggttcattatttatgtagtacattctgatcacagaggttataaactgaaaaatatgcatcttagaatcaattaagaacatttaaaaaatagcactcacaggccgggcacggtggctcatgcctgtaatcccagcactttgggaggctgaggtgggcggatcacgaggtcaggagatcaagaccatcctggctaacac

SEQ ID NO: 6398 - DNA, 84 bp, Homo sapiens
  misc_feature 1..84: note = U/M: U (0.26:0.86) in Fallopian + Ovary Epithelium
  misc_feature 1..84: note = source = chr22:50015331-50015414; Gene: C22orf34 (intron)
  source 1..84: mol_type = genomic DNA
cggccgaccacacaggtcagccacggtggatgccaggttccccagaccaagggctgccaggagcggaggcactcatttgcagcc

SEQ ID NO: 6399 - DNA, 299 bp, Homo sapiens
  misc_feature 1..299: note = U/M: U (0.3:0.86) in Fallopian + Ovary Epithelium
  misc_feature 1..299: note = source = chr10:49794755-49795053; Gene: ARHGAP22 (intron)
  source 1..299: mol_type = genomic DNA
cgtagttattgtcttagctgttctgattttgggtgattaatcaactggaacatctttgcacgggcttctaccaattgtatgagacgtctgctcgctccatttgcccatttagctgattgcccacagcaggaggagcactgagtcaaactcagtggcatacaatcctggagtcctggagacccagagctactgggccccctttccctctccataggagccccagaccttccctgcaagtcttcctacagcctggaatttccagacacctgtatttccagacacctgtagcaccctatccc

SEQ ID NO: 6400 - DNA, 74 bp, Homo sapiens
  misc_feature 1..74: note = U/M: U (0.04:0.89) in Fallopian + Ovary Epithelium
  misc_feature 1..74: note = source = chr3:54879942-54880015; Gene: CACNA2D3 (intron)
  source 1..74: mol_type = genomic DNA
cggcctaggggagcgccaatttgagatggcccctgtgggcgtggaattatacgaagtctagaagtgaggcagcg

SEQ ID NO: 6401 - DNA, 95 bp, Homo sapiens
  misc_feature 1..95: note = U/M: U (0.06:0.91) in Fallopian + Ovary Epithelium
  misc_feature 1..95: note = source = chr1:60271893-60271987; Gene: HOOK1 (Intergenic)
  source 1..95: mol_type = genomic DNA
cgctctgttgccaggctggagtgcagtggcatgatcttggctcactgcaacctccgcctcccgggttcaagcgattctcatgcctcagcctcccg

SEQ ID NO: 6402 - DNA, 98 bp, Homo sapiens
  misc_feature 1..98: note = U/M: U (0.11:0.96) in Fallopian + Ovary Epithelium
  misc_feature 1..98: note = source = chr1:28727151-28727248; Gene: PHACTR4 (intron)
  source 1..98: mol_type = genomic DNA
cgcaatctcagcttagtgcaacctctgcctcccagattgaagcgattctcctgcctcaacctccagagtagccaggactacaggcgcgcgccaccacg

SEQ ID NO: 6403 - DNA, 132 bp, Homo sapiens
  misc_feature 1..132: note = U/M: U (0.06:0.91) in Fallopian + Ovary Epithelium
  misc_feature 1..132: note = source = chr1:28727848-28727979; Gene: PHACTR4 (intron)
  source 1..132: mol_type = genomic DNA
cgctctgtcacccaggctggagtgcagtggcacgatcttggctcactgcaacctccacctcccgagttcaagccattttcctgcctcagcctcccacgtagctgggattacaggcgcccgccaccatgcccg

SEQ ID NO: 6404 - DNA, 161 bp, Homo sapiens
  misc_feature 1..161: note = U/M: U (0.08:0.93) in Fallopian + Ovary Epithelium
  misc_feature 1..161: note = source = chr17:67420643-67420803; Gene: MAP2K6 (intron)
  source 1..161: mol_type = genomic DNA
cggagaggttaagaacttgcctcagttaccaaaccgatagtggcagagcagaggttttagccaaggtctgtctgacctcagaatctgagctcctggcgactccacttgagacgtcactccaaaataaaggtatgaaatccattacaccaaagacatggtcg

SEQ ID NO: 6405 - DNA, 184 bp, Homo sapiens
  misc_feature 1..184: note = U/M: U (0.04:0.88) in Fallopian + Ovary Epithelium
  misc_feature 1..184: note = source = chr7:120527575-120527758; Gene: TSPAN12 (Intergenic)
  source 1..184: mol_type = genomic DNA
cggaccaggaacaatggtaattgtgggacttaacaaagagtgagtacagctgaaggagccggggagcagaaagtatatgcgtcaggtatgaggaagaaaatagattttggaagttatgagaaatgtagcgagtgagttgagcatggtttgtgatttttagggcctctaaaatattaaagcagcg

SEQ ID NO: 6406 - DNA, 326 bp, Homo sapiens
  misc_feature 1..326: note = U/M: U (0.08:0.92) in Fallopian + Ovary Epithelium
  misc_feature 1..326: note = source = chr2:73987714-73988039; Gene: DUSP11 (Intergenic)
  source 1..326: mol_type = genomic DNA
cgctcgcacgtagtcattttggtagagagcagtcactaacaagtgattaactttatatcctaacccccaggggctgcttgcaagattaacgtacttgtttttcttttaaagaacaatgatccttaggtcatactgacctccctgatggcatccagaaatttgactggccaagggacacgagcagctttgatcatcagggaaagcccccaattacatgcaaaggaaggtcatatttgagaatctgcttctcccaccctcatactttggccaaattgaataaacctttctaagcattaatgtgtcagtgtttggcttactgtgcaccg

SEQ ID NO: 6407 - DNA, 163 bp, Homo sapiens
  misc_feature 1..163: note = U/M: U (0.05:0.88) in Fallopian + Ovary Epithelium
  misc_feature 1..163: note = source = chr12:97092957-97093119; Gene: NEDD1 (Intergenic)
  source 1..163: mol_type = genomic DNA
cgaagactcgcctgcaatcagtctgattggttgcggacagccaatttcctatctgccccgcagaaaaggtgggggtttccaaagggagtaacctctggtccttttgttactcaggcgtggaaagttagggttttcctttcgatttagttcaaggaagttcgcg

SEQ ID NO: 6408 - DNA, 307 bp, Homo sapiens
  misc_feature 1..307: note = U/M: U (0.04:0.87) in Fallopian + Ovary Epithelium
  misc_feature 1..307: note = source = chr19:14369505-14369811; Gene: LPHN1 (Intergenic)
  source 1..307: mol_type = genomic DNA
cgtgagccaccgggcccggcccatacatatctgctttggggccacaattcaacctgctacaatcacaatagatgttgtgatttttccacctctttctctttttttggacttgtttttcatagtctggggcataattcatttaaaccattttctttgattgatgaaccgtacattgttgccaactctttgttctttcctagttttttgtctgcactgtattgtactggagaacaaatatttctccaagaagtgttcccactggtggaaggacaggctggtttttggtttttgggtgttttttgagacg

SEQ ID NO: 6409 - DNA, 391 bp, Homo sapiens
  misc_feature 1..391: note = U/M: U (0.03:0.86) in Fallopian + Ovary Epithelium
  misc_feature 1..391: note = source = chr2:237233447-237233837; Gene: IQCA1 (intron)
  source 1..391: mol_type = genomic DNA
cggaaaaggtcagaatgacaccaattcaccgcaatactcttaaaaataaagaaaagcctgctaagcaggaaggggcaagcagccattgtactttgggcatttaaggtatgcttgacacaagctctttctcagtgggttttccagactgtttttctgcatgatttgaaacttcaacctgtatttctgcatgatttgttaactcagggagttaacaatttcagagaatctcaggctaaacctaaccagccatccttcccaacaaagttgcctgtttttccggggttgggttttcttggtaacgtgaagggtgctcatggttcatatgtggccatgttcagtaaacaatgggcggccattcaactactctgggggagttgctgttgaaaccacg

SEQ ID NO: 6410 - DNA, 144 bp, Homo sapiens
  misc_feature 1..144: note = U/M: U (0.08:0.9) in Fallopian + Ovary Epithelium
  misc_feature 1..144: note = source = chr14:104024102-104024245; Gene: BAG5 (exon)
  source 1..144: mol_type = genomic DNA
cgggcggatcacgaggtcaggagttcgagaccagcctgaccatcatggtgaaatctcaactctattaaaaatacaaaaattagccaggcatggtgccacatgcctgtactcccagctactcaggtggctgaggcaggagaatcg

SEQ ID NO: 6411 - DNA, 280 bp, Homo sapiens
  misc_feature 1..280: note = U/M: U (0.05:0.87) in Fallopian + Ovary Epithelium
  misc_feature 1..280: note = source = chr5:88219993-88220272; Gene: MEF2C (Intergenic)
  source 1..280: mol_type = genomic DNA
cgagcgctcgggagattggcattactctgcagtagtgtcacagcccgcagtcatttaatgcctcttcttgtgaggccaggattccacgcccaagtgcatttagtaggtcagtacagtaattttaaatgtctttctttcaatcttttgccatcttcaattatacctttccaccctactatttgtgtaattttcttctgtctgaagtctctttactgttgttctctattgcacagcatgacaaattacccatcaagccatatcttttcagcccagaaatgcg

SEQ ID NO: 6412 - DNA, 464 bp, Homo sapiens
  misc_feature 1..464: note = U/M: U (0.09:0.91) in Fallopian + Ovary Epithelium
  misc_feature 1..464: note = source = chr1:64949730-64950193; Gene: CACHD1 (intron)
  source 1..464: mol_type = genomic DNA
cgtcatgccccctaacctctcacaggtaagcactgtattgttcaatgctatattcctgtagaatggtgcttggcacttagaagtaccccataaatcattattggacaagggttagcgggagcgacaactctaaaagggaatctgaagcagtgatggaaaggaggagccaatcaggggaggggctgggggcctagtagaaggaggaaccaatcaacggagaggttgggaggggacttggcagaaggaggaggagccaaccaggggagcggtttagggggtctagcattccaacagaaggaagaggctttgtagaggtcttgagagacaggaccttggtgtagtttaagaactgaaagaaagccaggcggctgacagcatacaagcagaagggtgatgtgaagggaggaatttgggttcttattcctcttcaattcaggtatatttcccagtagctcttttaggcg

SEQ ID NO: 6413 - DNA, 236 bp, Homo sapiens
  misc_feature 1..236: note = U/M: U (0.13:0.94) in Fallopian + Ovary Epithelium
  misc_feature 1..236: note = source = chr17:8453016-8453251; Gene: MYH10 (intron)
  source 1..236: mol_type = genomic DNA
cgctctccctctccctctccctctctttccacggtctccctctcatgctgagccgaggctggactgtgctgctgccatctcggctcgctgcagcctccctgcctgattctcctgactcagcctgcccagtgcctgcgattgaaagctcgcgccgccacgcctgactggttttggtggagacggggtttcgctgtgttggccaggccggtctccagcccctaaccgcaagtgatccg

SEQ ID NO: 6414 - DNA, 363 bp, Homo sapiens
  misc_feature 1..363: note = U/M: U (0.11:0.92) in Fallopian + Ovary Epithelium
  misc_feature 1..363: note = source = chr4:153664211-153664573; Gene: TIGD4 (Intergenic)
  source 1..363: mol_type = genomic DNA
cgattaggcctggtggaactgccatcaataaatcaagcgtgatcagggtgaggaacaggaaagaaggaaatttggggaaatggggtgaatgtcaggtggatcagagagatacagtcatgggggtcaggtgtggtatgaggaataatgtgggaggccagattgaagtccgggccaggaacaatggtaattgtgggactgaaagagtgagtacagctgaaggagccggggagcagaaagtatatgcgtcaggtatgaggaagaaaatagattttggaagttacgagaaatgtagagagtgagttgagcatagtttgtgatttttagggcctctaaaagtattaaggcagtggcagccgctgcacg

SEQ ID NO: 6415 - DNA, 415 bp, Homo sapiens
  misc_feature 1..415: note = U/M: U (0.08:0.89) in Fallopian + Ovary Epithelium
  misc_feature 1..415: note = source = chr4:109633949-109634363; Gene: AGXT2L1 (Intergenic)
  source 1..415: mol_type = genomic DNA
cgtgcagcagctgctgccgccctaataattttagaggccctcaaaatcacaaactatgctcaacttactctctacatttctcataacttccaaaatctattttcttcctcatacctgatgcatatactttctgctccccggctccttcagctgtactcactctttgttaagtcccacaattaccattgttcctggcccggacttcaatccggcctcccacattattcctgataccacacctggcccctatgaatgtatctctctgatccacctgacattcaccccatttccccatattgccttccttcctgttcctcaccctgatcacacttgatttattgatggcggttccaccaggcctaatcgccacacaccagcaaaggcaggctatgctatagtacaagccactagcccg

SEQ ID NO: 6416 - DNA, 466 bp, Homo sapiens
  misc_feature 1..466: note = U/M: U (0.09:0.9) in Fallopian + Ovary Epithelium
  misc_feature 1..466: note = source = chr1:9980646-9981111; Gene: CTNNBIP1 (Intergenic)
  source 1..466: mol_type = genomic DNA
cggtgaccagaagcacttgctataacaataaatgtcacaaggagtttcagaaacaaattgttccctttcttgcagtcacttctgtgtaaacacaagatgaagttctttctatcagggttggctctacctgccccaaaatgctcactcttctctttttttttttttgaaaccaggtctcactctgtcacccaggctggagcacagtggcatgacctcagcggactgcaacctcagcctcccatgctcaagtgatcctcccacctcagctttgtgagtagctgggattacaggcacgcaacctcctatagtcataggcgcgtgccaccacacccagctaatttctgtattttttttgtagagatggggacttgccatgttgcccaggctggtctcaaactcccgagctcaagtgatccagccccctagacttcccaaagtgttgggattacaggcatgagccaccgcg

SEQ ID NO: 6417 - DNA, 162 bp, Homo sapiens
  misc_feature 1..162: note = U/M: U (0.07:0.87) in Fallopian + Ovary Epithelium
  misc_feature 1..162: note = source = chr21:46081315-46081476; Gene: TSPEAR (intron)
  source 1..162: mol_type = genomic DNA
cgaggaatataaaagaggacatggaggtacactgccgtaaagtcctgccacttacagatgaagtggcgtcatattacccggaggtatcctttgttacagtaaaggtatgtattgtaactcttaggccaaataagtttgaaaggacgtattaggctattatcg

SEQ ID NO: 6418 - DNA, 403 bp, Homo sapiens
  misc_feature 1..403: note = U/M: U (0.1:0.9) in Fallopian + Ovary Epithelium
  misc_feature 1..403: note = source = chr6:111611322-111611724; Gene: KIAA1919 (Intergenic)
  source 1..403: mol_type = genomic DNA
cgtttcccagtcagggaaccaaaaaatgtagcaggatgagctgcagacaaaacctctcagacaccaggttgtagaaggaagggctttattcagctgggagcatcggcaagctactgccttaaaatccgagctcctcgagtgcacaatttctatcccttttaagggcccacaacactgaagatttcacatgaaagggtcatgattgatttgagcaagcaaggggtacgtgacaggggctgcatgcaccggtggtcagagagaaacagaacagggcagggagtttcacaatgttcttctatacaatgtctggaatctatgaataacatcggtttctaagtcatgagttgatttttatctactaggtttaggccaggcaggcccaggtccagttttgggcctggcg

SEQ ID NO: 6419 - DNA, 107 bp, Homo sapiens
  misc_feature 1..107: note = U/M: U (0.1:0.89) in Fallopian + Ovary Epithelium
  misc_feature 1..107: note = source = chr2:8778679-8778785; Gene: ID2 (Intergenic)
  source 1..107: mol_type = genomic DNA
cgctggagctggcggtggggccgcggccagcgtgtcagcattccctttgttgtctatttctaaggtgtttataacgaagcctttttctgctccaagctcaccccccg

SEQ ID NO: 6420 - DNA, 167 bp, Homo sapiens
  misc_feature 1..167: note = U/M: U (0.12:0.91) in Fallopian + Ovary Epithelium
  misc_feature 1..167: note = source = chr18:45840495-45840661; Gene: ZBTB7C (Intergenic)
  source 1..167: mol_type = genomic DNA
cgtagcaacgcaagaacgaactaacacaataaggttaccaaatttagtgaacaaaagtacaggatgctcagttatatctgaatttcagataaacaacaaataactttttagtataagtgcgttctgtgcaatatgcgggattactgataacttcttgcttcagttcg

SEQ ID NO: 6421 - DNA, 234 bp, Homo sapiens
  misc_feature 1..234: note = U/M: U (0.12:0.91) in Fallopian + Ovary Epithelium
  misc_feature 1..234: note = source = chr19:20061790-20062023; Gene: ZNF93 (Intergenic)
  source 1..234: mol_type = genomic DNA
cgggtccacaacatacttctgtctccttactaactggacaggcacttgcgccctagtctgccttactcccaacattaacattgtcctttcaaaccaggaactccctgttccagctacaatacatacccactcaaaaagaacaatacagttgattccctattcacaatagcaaagacatggacaggccctaaatgcctatcaatggataaaggaaacacggtatggtcagacgcg

SEQ ID NO: 6422 - DNA, 272 bp, Homo sapiens
  misc_feature 1..272: note = U/M: U (0.08:0.87) in Fallopian + Ovary Epithelium
  misc_feature 1..272: note = source = chr2:120469972-120470243; Gene: TMEM177 (Intergenic)
  source 1..272: mol_type = genomic DNA
cgtatttggaggtaaggcctttaaggatgattaagttaaaatgaggtcatttgagtggacgctaatccagtgtgactggtgtccttataagaggaaatttggatacacagagacaccagggatgcatgggctcagagaaaaggccacatgaaggcacggcaagaagggggcatccacaagccaagaagaggggcctcaggagaaaccagccctgccaacaccttgaccttcgacttccaacctccacagctgtgagaaagaaatgtctatcg

SEQ ID NO: 6423 - DNA, 339 bp, Homo sapiens
  misc_feature 1..339: note = U/M: U (0.12:0.91) in Fallopian + Ovary Epithelium
  misc_feature 1..339: note = source = chr1:155462172-155462510; Gene: ASH1L (intron)
  source 1..339: mol_type = genomic DNA
cgacaatcttcactacactttcaattaattatttttcggtttcttttcgtttttcctttatttgccatgttaaattctaaaaatataatctgggggtagggaagcagcctttattccaaaaggtttgctcattgttctaagaacattgctcattgttctaagaacattactcatttcatgcccattgattatttataattaatgtaatgtaataacatacttattacatattcttattcgtatttggatcttactctaaattcctaaggttttgtttcattcatatttatgattattattgtgccactaatatatggatattataacttcataataacg

SEQ ID NO: 6424 - DNA, 96 bp, Homo sapiens
  misc_feature 1..96: note = U/M: U (0.09:0.87) in Fallopian + Ovary Epithelium
  misc_feature 1..96: note = source = chr19:13019339-13019434; Gene: SYCE2 (intron)
  source 1..96: mol_type = genomic DNA
cgtgttagccaggatggtttccatctcgtgacctcatgatctgcccacctcagcctctcaaagtgctgggattacaggcgtgagccaccgcgcccg

SEQ ID NO: 6425 - DNA, 124 bp, Homo sapiens
  misc_feature 1..124: note = U/M: U (0.06:0.84) in Fallopian + Ovary Epithelium
  misc_feature 1..124: note = source = chr2:680602-680725; Gene: TMEM18 (Intergenic)
  source 1..124: mol_type = genomic DNA
cgggctgggtctacgaccccgggcagcttctgtgcgggttcctggttcctccctttgtgtctctgggctgcaccagtttgaccctgatgtgaaatctgatgcctctgtcagtttgtacaatgcg

SEQ ID NO: 6426 - DNA, 131 bp, Homo sapiens
  misc_feature 1..131: note = U/M: U (0.12:0.9) in Fallopian + Ovary Epithelium
  misc_feature 1..131: note = source = chr5:137859050-137859180; Gene: ETF1 (intron)
  source 1..131: mol_type = genomic DNA
cgtctcaaggaaaaaacaaaaaaattagccgagcgtggtggcatgtgcctgtagtcccagctactggggaggctgaggcaggagaatcgcttgaacccgggaggtgggggatgcagtgagccgagaccacg

SEQ ID NO: 6427 - DNA, 136 bp, Homo sapiens
  misc_feature 1..136: note = U/M: U (0.16:0.94) in Fallopian + Ovary Epithelium
  misc_feature 1..136: note = source = chr10:61553339-61553474; Gene: CCDC6 (intron)
  source 1..136: mol_type = genomic DNA
cgagaccagcctggccaacagggcaaaaccccgtctctattaaaaatacaaaaagcagccaggtgtggtgccgtgtgcctgtaataccagctactcgggaggctgaggcaagagaatcccttgagctccggaggcg

SEQ ID NO: 6428 - DNA, 377 bp, Homo sapiens
  misc_feature 1..377: note = U/M: U (0.12:0.9) in Fallopian + Ovary Epithelium
  misc_feature 1..377: note = source = chr16:29645054-29645430; Gene: SLC7A5P1 (Intergenic)
  source 1..377: mol_type = genomic DNA
cgagaccgtgccactgcactccagcctgtgtgacacagcgagtcctgtctcaaaaaaaaaaaaaagcaatcctaatgatggatcaccactttcttcattagatctacaccccagcaagcgattacctttaaaaacacgcctatcacagaaaccattctctcccacgacagcttccttgtaattttggtatttcacagaattccagtgaactaaatgcagctgaaacacaatggaaagagaacttaaattgatcagcaagaaataagacagtcacttccccttctgaatggctgacctatgtgtccacttaatcataatgaaatggccaggcgcagtggctcacacctgtaatcccagcaccttgggaggctgaggcg

SEQ ID NO: 6429 - DNA, 420 bp, Homo sapiens
  misc_feature 1..420: note = U/M: U (0.06:0.84) in Fallopian + Ovary Epithelium
  misc_feature 1..420: note = source = chr2:71479137-71479556; Gene: PAIP2B (Intergenic)
  source 1..420: mol_type = genomic DNA
cgtgaaaagtgctgcaatgaacgtacacatgcatgtgtctttatggtagagtgatttatactccttcgggcatatactcaataataggattgctgggttgaatagttatgctttgagttctttgagaaatcgccaaactgctttccacaatggcagaactaatttatattcccaccagcagtgtataagctttttttttctctgcaaccttgccagcatctgttattttttcactttttaataatagctcttctcactggtgtaagacggtatctcattgtggttttggtttgtatttctctaatgattagtgacattgaacattttttcatgcttgttggctgtgtgtatgtcttcttttgaaaagttagactataattttcaatatatgtataggattctattgttgtatgtttgtcg

SEQ ID NO: 6430 - DNA, 130 bp, Homo sapiens
  misc_feature 1..130: note = U/M: U (0.04:0.81) in Fallopian + Ovary Epithelium
  misc_feature 1..130: note = source = chr2:233240148-233240277; Gene: ALPP (Intergenic)
  source 1..130: mol_type = genomic DNA
cgcattttgattttacctatcctcaaactgaccctttgctcattataatagtaaaaagcgcaccccgggtggagatttaagaagctaatgagacctgcgacatacgagccagcatgtacagctactcacg

SEQ ID NO: 6431 - DNA, 179 bp, Homo sapiens
  misc_feature 1..179: note = U/M: U (0.06:0.83) in Fallopian + Ovary Epithelium
  misc_feature 1..179: note = source = chr19:3581545-3581723; Gene: GIPC3 (Intergenic)
  source 1..179: mol_type = genomic DNA
cgtgagtagctgggaccacaggtgcctgccatcactcctgcctaattatttatttaatttatttatttatttatttttctgtgagacagagtctcgctctattgcctaggctggagtgcaatggctggatctcaggtcactgcaacctccacctcccgggttgaagcgattctcccacg

SEQ ID NO: 6432 - DNA, 79 bp, Homo sapiens
  misc_feature 1..79: note = U/M: U (0.12:0.88) in Fallopian + Ovary Epithelium
  misc_feature 1..79: note = source = chr18:76683099-76683177; Gene: SALL3 (Intergenic)
  source 1..79: mol_type = genomic DNA
cggtgaaccccccgcctaccctcccctccgagtctcgcacacactggcgctgggtgacagccgacttcaggaagcagcg

SEQ ID NO: 6433 - DNA, 124 bp, Homo sapiens
  misc_feature 1..124: note = U/M: U (0.08:0.84) in Fallopian + Ovary Epithelium
  misc_feature 1..124: note = source = chr11:67564256-67564379; Gene: FAM86C2P (intron)
  source 1..124: mol_type = genomic DNA
cgcaggaccccgaccagcgacacgatggcttctgggctatacagcacgtctacggtgaaagcttcaggttactgaaagggaccagcggacagttccaggtcatgctgacctcagcagcagggcg

SEQ ID NO: 6434 - DNA, 322 bp, Homo sapiens
  misc_feature 1..322: note = U/M: U (0.13:0.89) in Fallopian + Ovary Epithelium
  misc_feature 1..322: note = source = chr6:168624884-168625205; Gene: DACT2 (Intergenic)
  source 1..322: mol_type = genomic DNA
cgttctctggacagccaggctgtgcccagggacagtgggattggtgggcagccccactagaatcatgcagaatggagcaggcttgtccacaaaggctctgattacagctgaaacaggcccccagggagtgcttggagtggcatggagcagaaataagggtacggtcacccacagatatgaggaccgaggcagagcaagcatgtgggagtccctcagcaagcccagatgccatgcaccaaggaagcttcctcaccccgagtcccccgaggtctgaggagggcggctgggtctggctccataagtggcaccatggtttgatgcg

SEQ ID NO: 6435 - DNA, 388 bp, Homo sapiens
  misc_feature 1..388: note = U/M: U (0.06:0.82) in Fallopian + Ovary Epithelium
  misc_feature 1..388: note = source = chr19:49643282-49643669; Gene: PPFIA3,PPFIA3 (exon,intron)
  source 1..388: mol_type = genomic DNA
cgtctctttggcaagaaagagaagggacgaatgggacccccaggccgggacagctcttctctgggtgagtacctcactctaacccttccctcctttgttccttcctcccttcctccctccctttctttcttctttgtatgttcatttgacatccattcatgtcttcattcatttggtgatttatttagaatttggaaggaacacagcttgccaaggtaggcgggaggaggagggaaaaggaaagggcactctgggacctgcttgggtgactgggtaggtaaaggaatttatttcctttacttatttttttgttgttttttggtttttgttgttgttgttttgagatggagtttcactctgtcacccaggctggagtgcagtggcaacg

SEQ ID NO: 6436 - DNA, 104 bp, Homo sapiens
  misc_feature 1..104: note = U/M: U (0.14:0.89) in Fallopian + Ovary Epithelium
  misc_feature 1..104: note = source = chr19:11264642-11264745; Gene: SPC24 (intron)
  source 1..104: mol_type = genomic DNA
cgggaggctgaggcaggagaatggcgtgaacccaggagacgcagcttgcagtgagccaagattgcgccactgcactccagcctgggtgacagagcaagactccg

SEQ ID NO: 6437 - DNA, 206 bp, Homo sapiens
  misc_feature 1..206: note = U/M: U (0.18:0.93) in Fallopian + Ovary Epithelium
  misc_feature 1..206: note = source = chr2:206701896-206702101; Gene: NRP2 (Intergenic)
  source 1..206: mol_type = genomic DNA
cgagaccatcctggctaacacagtgaaaccccgtctctactaaaaatacaaaaacaaaattagccaggcgtggtggcgggtgcctgtagtcccaactactcaggaggctgaggcagaagaatggcgtgaacctgggaggcgaagcttgcagtgagctcggagatcgcaccactgcactccagcctgggtgacagagcgagactccg

SEQ ID NO: 6438 - DNA, 242 bp, Homo sapiens
  misc_feature 1..242: note = U/M: U (0.05:0.8) in Fallopian + Ovary Epithelium
  misc_feature 1..242: note = source = chr11:68130480-68130721; Gene: LRP5 (intron)
  source 1..242: mol_type = genomic DNA
cgagtcctcatttgctgggcactgtaagcatctagaaaagaatagctgtttctcgggttgatgccaagtttcatttactctgaaagtataaattatgagcattgtaagaaggagcgagtgcacatggcctgatttgtatacagaggttaaagcgttgggcaggagaggtgtgctttttgccaggcatggcttcctcctttcttccctgggggagactttgccacttgacctgggggagcccg

SEQ ID NO: 6439 - DNA, 263 bp, Homo sapiens
  misc_feature 1..263: note = U/M: U (0.16:0.91) in Fallopian + Ovary Epithelium
  misc_feature 1..263: note = source = chr7:106245661-106245923; Gene: CCDC71L (Intergenic)
  source 1..263: mol_type = genomic DNA
cgagcctacttctaaatgtcaccctcgctgtttctctggatcctacttctcccgcctgccaactctttctgctgattctctgcatagaattcaattcaatgaaattcaataggcaattaatggatgtcagccacaggccaaacaccatgctaagaattgaggttattaaattaacactccccaaggagtggctagactaactggggagacagaaaagcaaattattataatgcggcaactaccacaatagagggatgcacacg

SEQ ID NO: 6440 - DNA, 300 bp, Homo sapiens
  misc_feature 1..300: note = U/M: U (0.08:0.83) in Fallopian + Ovary Epithelium
  misc_feature 1..300: note = source = chr7:43245855-43246154; Gene: HECW1 (intron)
  source 1..300: mol_type = genomic DNA
cgcggcagctgatctgccacggagtcaagaggatcttccgggaggctctgtcatttctgtaaatcaaggggttaggaagacaggggagaggagagggaaatggaatgcgaaggtaagggttggccaaaaaggtctaccgtgcttttttctggtcttttattttttgtctcttctgctctctattggatcaaacatattttgttttatagctttctttcctcccctcagtcccccactagcttggaagtaatgtgttctacttcaattctttagtggttaactttcattttttaagaggcg

SEQ ID NO: 6441 - DNA, 339 bp, Homo sapiens
  misc_feature 1..339: note = U/M: U (0.1:0.85) in Fallopian + Ovary Epithelium
  misc_feature 1..339: note = source = chr1:36059437-36059775; Gene: TFAP2E (intron)
  source 1..339: mol_type = genomic DNA
cggtcaccttgacaggtcatccaacctgtccgaaaccagttttcttgtccgtatgatggggataataatagtatagacttgttatgaagattaagatgatgcagacagtgtggttggcacagcatccagccttcaattatattcactgctagttattatttccggcagattctggattgtttcctgatagcttcaaagacaaagttctgtgaagcattgagtgtttggggtgggagagggaatccaggaaagtttcctatataaggtagtaagtagctgagctgcactttgaatgaatatgggccagacatccaaaaaagaaacattacagggtgatcg

SEQ ID NO: 6442 - DNA, 415 bp, Homo sapiens
  misc_feature 1..415: note = U/M: U (0.12:0.87) in Fallopian + Ovary Epithelium
  misc_feature 1..415: note = source = chr3:39620969-39621383; Gene: MOBP (Intergenic)
  source 1..415: mol_type = genomic DNA
cgggctagtgacttgtactatagcatagcctgcctttgctggtgtgtggcaattaggcctggtggaactgccattaataaatcaagcgtgatcagggtgaggaacaggaaagaaagaagtatggggaagtggggtgaatctcaggtggatcagagagatacagtaatgaggctcaggtgtggtatccagaataatgtgggaggccggattgaagtccgggccaggaacaatggtaattgtgggacttaacaaagagtgagtacagctgaaggagccggggagcagaaagtatctgcgtcaggtatgaggaagaaaatagattttggaagttatgagaaatgtagagagtaagttgagcataggttgtgattttgagggcctctaaaagtattagggcggcagcagccactgcacg

SEQ ID NO: 6443 - DNA, 50 bp, Homo sapiens
  misc_feature 1..50: note = U/M: U (0.16:0.9) in Fallopian + Ovary Epithelium
  misc_feature 1..50: note = source = chr1:175777363-175777412; Gene: TNR (Intergenic)
  source 1..50: mol_type = genomic DNA
cggagtctcggtctgtcgcccaggctggagagtgcagtggcgcgatctcg

SEQ ID NO: 6444 - DNA, 194 bp, Homo sapiens
  misc_feature 1..194: note = U/M: U (0.12:0.86) in Fallopian + Ovary Epithelium
  misc_feature 1..194: note = source = chr12:131498555-131498748; Gene: GPR133 (intron)
  source 1..194: mol_type = genomic DNA
cgcctgcaggtaccagcttcacatcttgaaggagagcagcgggagctgaatgaaagaaatcaaagcttcatccaaagaagatttccgtctcaatagttttgggtggaacgctggctcccagcctaggttctagctgtgtgctgctcccctgcgtttcccattttgtaatgatttccgtctcttcccaaggatcg

SEQ ID NO: 6445 - DNA, 206 bp, Homo sapiens
  misc_feature 1..206: note = U/M: U (0.04:0.78) in Fallopian + Ovary Epithelium
  misc_feature 1..206: note = source = chr8:60160268-60160473; Gene: TOX (Intergenic)
  source 1..206: mol_type = genomic DNA
cgggaaagaggaggtcatgctgccctgcacccggctgcagtgcccacagtgccctaacgactgtcattgtttcccacagtggtgggaaactccttcacacagtgagggagttctgaaaaagaagggcttgcatgtgtgtatcagaggacctgcggtattactggcatcatgtttcatttggccctgtctctattttaaaataaacg

SEQ ID NO: 6446 - DNA, 215 bp, Homo sapiens
  misc_feature 1..215: note = U/M: U (0.15:0.89) in Fallopian + Ovary Epithelium
  misc_feature 1..215: note = source = chr13:96202235-96202449; Gene: CLDN10 (intron)
  source 1..215: mol_type = genomic DNA
cgttatgctaaattaactgtttatacacacatacacagagctcaactggtcagagctgtggttctcagcctgagtccacattagaagttttggaaatactgctaccaaggccacccccagagattctggcttcactggtgtggcgatgcggcagagagaagagtgttccaagcaggaattcagaatttgtttcttccggatgctatgttgcaacg

SEQ ID NO: 6447 - DNA, 274 bp, Homo sapiens
  misc_feature 1..274: note = U/M: U (0.16:0.88) in Fallopian + Ovary Epithelium
  misc_feature 1..274: note = source = chr3:184824922-184825195; Gene: C3orf70 (intron)
  source 1..274: mol_type = genomic DNA
cggacatttcaatcatttctctatagcactggccgtccacgtggccaattcaacctactcaatttaacatagctggagttggtaaagcccctgaagtatatcaaagtagttatatcttgcattgtgaagggcccgatggacaacctgggactattcaaccaattataacttccgtacctataaatctatgggggagagatttattacaacaatggggagcacaagttctaattccagaacaattatatagccctcaaaggcaacatatgatgcg

SEQ ID NO: 6448 - DNA, 41 bp, Homo sapiens
  misc_feature 1..41: note = U/M: U (0.18:0.88) in Fallopian + Ovary Epithelium
  misc_feature 1..41: note = source = chr1:18916289-18916329; Gene: PAX7 (Intergenic)
  source 1..41: mol_type = genomic DNA
cggtgttgagccccgccgctccccccctccgccacaatacg

SEQ ID NO: 6449 - DNA, 96 bp, Homo sapiens
  misc_feature 1..96: note = U/M: U (0.12:0.82) in Fallopian + Ovary Epithelium
  misc_feature 1..96: note = source = chr16:84066952-84067047; Gene: SLC38A8 (exon)
  source 1..96: mol_type = genomic DNA
cgatctcccgcggggcagacaggggcaggatgaccagcacggagagcaggggcagggtgaagcgctggtctgcgtaccacggctgcggggcgggcg

SEQ ID NO: 6450 - DNA, 131 bp, Homo sapiens; identical to SEQ ID NO: 1801
  misc_feature 1..131: note = U/M: U (0.2:0.89) in Fallopian + Ovary Epithelium
  misc_feature 1..131: note = source = chr11:71506971-71507101; Gene: ALG1L9P,FAM86C1 (TTS,exon)
  source 1..131: mol_type = genomic DNA

SEQ ID NO: 6451 - DNA, 145 bp, Homo sapiens
  misc_feature 1..145: note = U/M: U (0.17:0.86) in Fallopian + Ovary Epithelium
  misc_feature 1..145: note = source = chr6:37537563-37537707; Gene: MIR4462 (Intergenic)
  source 1..145: mol_type = genomic DNA
cgctgatggaggggcagagccaggccagcatgcgggccctggctgttttcctactcacagcagccccctccccacagcttcattccctgcggaaagtgagcctgaaattatcctcagctcgcacgctcctgcacgcacacaggcg

SEQ ID NO: 6452 - DNA, 74 bp, Homo sapiens
  misc_feature 1..74: note = U/M: U (0.2:0.88) in Fallopian + Ovary Epithelium
  misc_feature 1..74: note = source = chr16:88194681-88194754; Gene: BANP (Intergenic)
  source 1..74: mol_type = genomic DNA
cgcttgaacccagggggcagagcttgcagtgagccgagatcgcgccattgcactccagcctgggtgacggagcg

SEQ ID NO: 6453 - DNA, 189 bp, Homo sapiens; identical to SEQ ID NO: 1795
  misc_feature 1..189: note = U/M: U (0.21:0.89) in Fallopian + Ovary Epithelium
  misc_feature 1..189: note = source = chr11:61264069-61264257; Gene: MIR4488 (Intergenic)
  source 1..189: mol_type = genomic DNA

SEQ ID NO: 6454 - DNA, 340 bp, Homo sapiens
  misc_feature 1..340: note = U/M: U (0.26:0.94) in Fallopian + Ovary Epithelium
  misc_feature 1..340: note = source = chr5:138910053-138910392; Gene: UBE2D2 (Intergenic)
  source 1..340: mol_type = genomic DNA
cgccacttaggcacaagaaggctcatgaggatatcgaacccctatctacatgctcaactgaatcatacagttgcaagctgttttagaaattattactaataaaaccggtcaagccttgaccgttcttgcccagcaagagactctgatgagaaatgctatctatcaaaatagaatagttcttgacaacttggtagcagctgaaggaggagtttgtagaaaatttaaccgtactaattattgtctacacatagatgatcaggggcaagtagttgagaatatagttaaagatataacaaaactggcacatgtacctgtgcaagtgtggcatggactcagtccg

SEQ ID NO: 6455 - DNA, 64 bp, Homo sapiens
  misc_feature 1..64: note = U/M: U (0.19:0.86) in Fallopian + Ovary Epithelium
  misc_feature 1..64: note = source = chr19:46302021-46302084; Gene: RSPH6A (intron)
  source 1..64: mol_type = genomic DNA
cgggaggcggaggttgcagtgagccgagatcgcgccactgcactccagcctgggcaacagagcg

SEQ ID NO: 6456 - DNA, 92 bp, Homo sapiens
  misc_feature 1..92: note = U/M: U (0.22:0.89) in Fallopian + Ovary Epithelium
  misc_feature 1..92: note = source = chr21:47256526-47256617; Gene: LOC100129027 (promoter-TSS)
  source 1..92: mol_type = genomic DNA
cggagcatagctttctcatgaacagccgtgaccccaggaccaggctaagcgagatgacccatgctgccgtgggtgcttcctcttctttaccg

SEQ ID NO: 6457 - DNA, 175 bp, Homo sapiens
  misc_feature 1..175: note = U/M: U (0.24:0.91) in Fallopian + Ovary Epithelium
  misc_feature 1..175: note = source = chr9:138912737-138912911; Gene: NACC2 (intron)
  source 1..175: mol_type = genomic DNA
cgcacccacacgtggcaccaaaaccaccctccgtctcagcctcgcaccctacacaaaaactgcagaaggtctttatgagcttaggttaagctaaagtcttagacaaggcccccaaagcacgatccacaatggaaatgattgacgagctagaattcatcagaatgaaaaacttccg

SEQ ID NO: 6458 - DNA, 229 bp, Homo sapiens
  misc_feature 1..229: note = U/M: U (0.1:0.77) in Fallopian + Ovary Epithelium
  misc_feature 1..229: note = source = chr9:140322925-140323153; Gene: NOXA1 (intron)
  source 1..229: mol_type = genomic DNA
cgaaggaggggtgctgagaggcccccccaccagaccccggaaatgcatcgccctgaagccttctgggaatagcattgtcttttaggacaaaaagatggaagggaaagcccactggtgtgggtctggagtcagggttaaagccaggtgggggcccgccagcccaggacacagaacggtgcaggggaggggccgggtggggggattgggagaggagctgggtggggagacg

SEQ ID NO: 6459 - DNA, 358 bp, Homo sapiens
  misc_feature 1..358: note = U/M: U (0.22:0.89) in Fallopian + Ovary Epithelium
  misc_feature 1..358: note = source = chr5:138902796-138903153; Gene: UBE2D2 (Intergenic)
  source 1..358: mol_type = genomic DNA
cgagatcacgccgctgcactccagcctgggcaacaagagtgagactccatctcaaaaaaaaaaaaaaaaaaaaaaagaacagggaagttgaacacactgacatattggttctttgaagacgaactcattgtacttaacaattttccacctcttgaattttaaaggaggttaacaggctaaaacctttgaagaggaatttattgtatcctacatcaccaaagcctgagggagaaggtgtcatgtttagtcctaatttattgttaaggaaactgaagcacaaagaagacgagtgacttggccaaggccatgcagctagcaagtggaggagccagagctttttgttccaccctcagccccg

SEQ ID NO: 6460 - DNA, 200 bp, Homo sapiens; identical to SEQ ID NO: 1831
  misc_feature 1..200: note = U/M: U (0.18:0.83) in Fallopian + Ovary Epithelium
  misc_feature 1..200: note = source = chr11:36501472-36501671; Gene: TRAF6 (Intergenic)
  source 1..200: mol_type = genomic DNA

SEQ ID NO: 6461 - DNA, 223 bp, Homo sapiens
  misc_feature 1..223: note = U/M: U (0.26:0.91) in Fallopian + Ovary Epithelium
  misc_feature 1..223: note = source = chr9:135749839-135750061; Gene: AK8 (intron)
  source 1..223: mol_type = genomic DNA
cgaaagaaacataaaagctccaagacatcggtcctccccaacagctcacaaaggacaggactgatcctccacttggcaaatggaccatggagtggagtgaggggccttccttgagtgagcgcctccctcctccccagttctgtgctccggccttgggtcaggctgacctgcaccggccaactgcaaaggtttggggagctcggaaactcattaacaggctccg

SEQ ID NO: 6462 - DNA, 251 bp, Homo sapiens
  misc_feature 1..251: note = U/M: U (0.28:0.93) in Fallopian + Ovary Epithelium
  misc_feature 1..251: note = source = chr2:55498546-55498796; Gene: MTIF2 (Intergenic)
  source 1..251: mol_type = genomic DNA
cgagatggcgccactgcactccagcctgggtgacagagcgagactccgtctcaaaataaataaataaataaataaataaataaataaataaataaaataaaaatcaactcataacctagaaaccgatgttattcatagattccagacattgtatagaacattgtgaaactccctgccctgttctgtttgtctctgaccaccggtgcatgcagcccctgtcacgtaccccttgcttgctcaaatcaatcacg

SEQ ID NO: 6463 - DNA, 362 bp, Homo sapiens
  misc_feature 1..362: note = U/M: U (0.19:0.84) in Fallopian + Ovary Epithelium
  misc_feature 1..362: note = source = chr3:71000941-71001302; Gene: MIR1284 (Intergenic)
  source 1..362: mol_type = genomic DNA
cgtgcaaaagccatttaaaattgtattttaagtgtagaaatataaacccaaggaaacatgtatagtaccctatattgaaaaggggaaaaagggttagcttttcaggggctgaaatgccttgtaaatattattctgtttagaagatagttttaaaatgtggcgttttatgtccaatagtaagaaagcaagtctgaaatcctgcgatttagtttaaaacccaaaatcaagctggtattaaagacttcgcataacaaaatagttttccttttctctctctgtcactaatgagaaatgagccagtgagagcagcccttcagaactttcacaaaggactgacaaattcttgattggatgccatatcg

SEQ ID NO: 6464 - DNA, 431 bp, Homo sapiens
  misc_feature 1..431: note = U/M: U (0.24:0.89) in Fallopian + Ovary Epithelium
  misc_feature 1..431: note = source = chr8:94685763-94686193; Gene: LINC00535 (intron)
  source 1..431: mol_type = genomic DNA
cgggtgctaattaatagtaagaacctgaacttttagatcagactgcctgggttcaaattccagttgtactatgtgtgacctgggtcaagttgctgaacctctcttctcttcatttcctaatctgtgtaatgagaatgatatgattaatatctaccccatgtggctattatgaccagtatgagaattaaatgagctcagaaactgcctagactatttggctcaactgttggattttactggatacgtacttagaaagcaacaatgggggtactccaagttgctcaccatgacacatcgctcctcattatttttctattgttgtagcacctctttccttctaatatactgtagaattgaattatttattacatctataattctttgcctgcattcatcactccaagagtacggggctctttgttttgttcacg

SEQ ID NO: 6465 - DNA, 287 bp, Homo sapiens
  misc_feature 1..287: note = U/M: U (0.11:0.75) in Fallopian + Ovary Epithelium
  misc_feature 1..287: note = source = chrX:43923373-43923659; Gene: NDP (Intergenic)
  source 1..287: mol_type = genomic DNA
cgtccccagatgggaatcaaaagaactaacttgtcagggaagaaagcctgactggggtcaacatgctccttatagtttagttcctaagtgctctttgtttctttgtgttctgtgccaattagtccatcatggtatgtctctcatgaggagaacatactcataaatctaactggaaaccggaacgtggcataaccatttgactatgggaaaaatcgatttgatttatgaggtattatgaaccagtgagccgtattgtactttcttctctgttgcctggcttaactgcg

SEQ ID NO: 6466 - DNA, 255 bp, Homo sapiens
  misc_feature 1..255: note = U/M: U (0.25:0.88) in Fallopian + Ovary Epithelium
  misc_feature 1..255: note = source = chr11:68130181-68130435; Gene: LRP5 (intron)
  source 1..255: mol_type = genomic DNA
cgtatgtcctgtgaattttacttcaataattttcttaaaaaacagcatcaacaaaaatgaacagaagaggtggtggatctgcagagcccacagctcccatcttccctgtgccacttcatgagtgtcaccctctcctggcaactgtgctgagggctggggacgtggcggggaccctctgcccccaggcccaccctcagggagcctgtcacggggcgagggtcattaagcaaataaaactgcacattaccgaccacg

SEQ ID NO: 6467 - DNA, 385 bp, Homo sapiens
  misc_feature 1..385: note = U/M: U (0.26:0.89) in Fallopian + Ovary Epithelium
  misc_feature 1..385: note = source = chr11:73654734-73655118; Gene: DNAJB13 (Intergenic)
  source 1..385: mol_type = genomic DNA
cgggggctgtgattaatcctgcagcagttacagccttttctgtttgtagcatagtattcattcctccctagtttcagctgcacataagatattatccatgtaacggatgatataacattttttaaactgttttctaactggcataaaaactttaacaacataagttggacaaatagttgggctatttaacatgccttgtggaaatacgttccaatagtatctatctgctgattctttgttatttatgacgggaacagtaaaagcaaatttttcataatcttgggtcgctaaaggaatggtaaaaaagcaaccttttaaatctatcactatgagaggccagtatttaggaatcgtagttggggagggcagccctggttgcagcgcg

SEQ ID NO: 6468 - DNA, 337 bp, Homo sapiens
  misc_feature 1..337: note = U/M: U (0.32:0.91) in Fallopian + Ovary Epithelium
  misc_feature 1..337: note = source = chr1:213240300-213240636; Gene: RPS6KC1 (intron)
  source 1..337: mol_type = genomic DNA
cggctcactgagataaccattaatacataccagattgcctcatttggagaagcgaatcagaaactcaaaaggatacagccatttgtcttttaactacctgtgacctgaaagccccctccccacgtcgagttgtcccacctttctggactgaaccagtgtacatcttacacgtatttattcatgtcttatgtctccctaaaatgtataaaatcaagctgtgcccctaccaccttgggcacatgttgtcaggatctcctgaggctgtgttaccggtgcggatcctcaaccttagcaaaatgaactttctaaagtaactaagacctgtctcagatattcg

SEQ ID NO: 6469 - DNA, 287 bp, Homo sapiens
  misc_feature 1..287: note = U/M: U (0.1:0.91) in Fallopian + Ovary Epithelium
  misc_feature 1..287: note = source = chr4:19457447-19457733; Gene: SLIT2 (Intergenic)
  source 1..287: mol_type = genomic DNA
cgcctccaggttccagcaattctcctgtctcagcttcccaagtagctgggattacaggcatgcgccaccacacccggctaatttttgtatttttagtagagtgaactatgttgaccagtctggtctcgaactcccgaccctaaggtgatccgccccccggggcctcccaaagtgctgagattataggcgtgagccaccgcgcctggccttgcttaacgactgcaggctcccgggcatctcccttcagactcccgtgatagggcttcctgtggtattatgagcttccg

SEQ ID NO: 6470 - DNA, 321 bp, Homo sapiens
  misc_feature 1..321: note = U/M: U (0.04:0.82) in Fallopian + Ovary Epithelium
  misc_feature 1..321: note = source = chr6:152127502-152127822; Gene: ESR1 (promoter-TSS)
  source 1..321: mol_type = genomic DNA
cgtcagatactctgttgggtgtttgggatagcaattaaaacaaagtattgatagttgtatcagagtctattaggctgcagcaaaggaagtttattcaaaagtataaactatccaagattatagacgcatgatatacttcacctattttttgtctccttaatatgtatatatatatatatatatatatatatacacatatatgtgtgtgtgtatgtgcgtgtgcatgtttaacttttaattcagttaaaaacttttttctatttgtttttcatctggatatttgattctgcatatcctagcccaagtgaaccgagaagatcg

SEQ ID NO: 6471 - DNA, 389 bp, Homo sapiens
  misc_feature 1..389: note = U/M: U (0.03:0.81) in Fallopian + Ovary Epithelium
  misc_feature 1..389: note = source = chr21:33202023-33202411; Gene: HUNK (Intergenic)
  source 1..389: mol_type = genomic DNA
cggtggtgcacatctgtaatctcagctacttgagaggctgaggcatgagaatcgcttgaacctgggaggtagaggttgcagtgagctgagatcacgccactgccctccagcctgggtgatagagcgagactccaactcaagaaacaaaaaaggttatatttgccaattactaagccaaagggcacaatcaaagtgataaatagtgcttttcaaactattgggttgtgtcccagtttttggattgtgaaatcaaattagcacaactgaatatgtaattttgaaaaacagaatagaatagaaaatgccagactgcattggatacatgcataaggagtgctatgggctgaatcatatccccacaaattcatatgttggagtcctaacccccg

SEQ ID NO: 6472 - DNA, 434 bp, Homo sapiens
  misc_feature 1..434: note = U/M: U (0.08:0.86) in Fallopian + Ovary Epithelium
  misc_feature 1..434: note = source = chr4:19457853-19458286; Gene: SLIT2 (Intergenic)
  source 1..434: mol_type = genomic DNA
cggctgtccttctgacaccatcttgaaacaggtttattcaaagataaaaaaggcagtacgaactctgcaataattcacagagcccattacataatgtaaaacaaccagtcagtgaaagcaaaactcttcattcgttactgagactcctacttgtgaagctgctggggaggtgacgggaggacaactggctgcacccctcaaacactgctctggcagcccagtccccacagctccgtttctgagccctggcgtccactactgtctggcctatgggcagtacgctcctcagtttggtttccctctcttctgcccacaccttggtaattagacctgcattaattagcttccactgtgttatgccgagataaaaactacccccacattttagtgtcttttaacaatagtttttcacttacattgtgtggaaatcaccg

SEQ ID NO: 6473 - DNA, 117 bp, Homo sapiens
  misc_feature 1..117: note = U/M: U (0.05:0.82) in Fallopian + Ovary Epithelium
  misc_feature 1..117: note = source = chr6:41434943-41435059; Gene: FOXP4 (Intergenic)
  source 1..117: mol_type = genomic DNA
cgcacatttcattgttcgttaggtgcttaagtccccactctcattttgtggcggtgacattaccgttgatggctctaatactctcataatttgaaaggggatttgcatgatagaacg

SEQ ID NO: 6474 - DNA, 388 bp, Homo sapiens
  misc_feature 1..388: note = U/M: U (0.18:0.82) in Fallopian + Ovary Epithelium
  misc_feature 1..388: note = source = chr8:55222361-55222748; Gene: SOX17 (Intergenic)
  source 1..388: mol_type = genomic DNA
cggtttctaagacttgatcagtgattttttttcctttcttcttctttttatttcatatctggggcccttccatcgtctctccaggagcacccgttagctccctttggctggctctctccccttctctccctcccttccttctcttcccctcacagcgggctcattaatccagtgcctttaccccaaaacaattaatcccaggttttcttcagattttctgtgtgcctctgatttctctactcagactcttcactttttccaatcaattcccagtcatttgtcttcatgagagtccatttcctatctaggatcacctgggtttagcttttgccagagcattttttttctaccagacccacaggtggtttaaggagaatttagaacagcg

SEQ ID NO: 6475 - DNA, 457 bp, Homo sapiens
  misc_feature 1..457: note = U/M: U (0.32:0.94) in Fallopian + Ovary Epithelium
  misc_feature 1..457: note = source = chr1:31506114-31506570; Gene: PUM1 (intron)
  source 1..457: mol_type = genomic DNA
cgatctcacctcactgcaacctccaccttccaggctcaagtgatcctcccatctcagcctcctgagcagctgagactataggtatgtgccaccacatccagctaattttctttttttttttttttttttttttttttgagacggagtctcgctctgtcgcccaggccggactgcggactgcagtggcgcaatctcggctcactgcaagctctgcttcccgggttcacgccattctcctgcctcagcctcccgagtatccagctaattttcatattttttgaagaagacgaggttttaccatgttgcccaggcaggtctcgaagccctaagcccaagtgatccatccagcatggcctcctaaagtgctgggcttacaggtgttagccaccacgcccagcccattttatttttttgagacagggtctggctctgttacctaggctggaatgcagtggcg

SEQ ID NO: 6476 - DNA, 142 bp, Homo sapiens
  misc_feature 1..142: note = U/M: U (0.05:0.93) in Fallopian + Ovary Epithelium
  misc_feature 1..142: note = source = chr14:105688093-105688234; Gene: BRF1 (exon)
  source 1..142: mol_type = genomic DNA
cgccccactcggggcttcctgctgcttccgagctgccgggggcaccaccaaggagctcccggtataagtctttgttcaggtggctggccgcggcttccagctcctcgtcctctgtgtcctcctcgccacacaagctggacgc

SEQ ID NO: 6477 - DNA, 151 bp, Homo sapiens
  misc_feature 1..151: note = U/M: U (0.05:0.93) in Fallopian + Ovary Epithelium
  misc_feature 1..151: note = source = chr22:41092705-41092855; Gene: MCHR1 (Intergenic)
  source 1..151: mol_type = genomic DNA
cgtaattatattttctgtagaagctttaactccccctcttctgatggagatatatacccaagagaattgaaaatatatccacacaacaacttgtacacaaaggtttatagaagcattattcataattaccgaaaggtggagacggccgggc

SEQ ID NO: 6478 - DNA, 113 bp, Homo sapiens
  misc_feature 1..113: note = U/M: U (0.07:0.95) in Fallopian + Ovary Epithelium
  misc_feature 1..113: note = source = chr8:101891130-101891242; Gene: YWHAZ (Intergenic)
  source 1..113: mol_type = genomic DNA
cgatctcctaacctcgtgatccgcccgcctcggcctcccaaagtgctgggattacaggcatgagccaccgcgcccggcccattttgaatttaactgggcagctatcctcccac

SEQ ID NO: 6479 - DNA, 88 bp, Homo sapiens
  misc_feature 1..88: note = U/M: U (0.05:0.91) in Fallopian + Ovary Epithelium
  misc_feature 1..88: note = source = chr20:23427139-23427226; Gene: CST11 (Intergenic)
  source 1..88: mol_type = genomic DNA
cgcctccgcctcccaaagtgctgggatgacaagcgtgagccactgcgcccagcctgcaagcagcctttctaaggacagcagttcaggc

SEQ ID NO: 6480 - DNA, 403 bp, Homo sapiens
  misc_feature 1..403: note = U/M: U (0.1:0.95) in Fallopian + Ovary Epithelium
  misc_feature 1..403: note = source = chr17:59161841-59162243; Gene: BCAS3 (intron)
  source 1..403: mol_type = genomic DNA
cgctctgaccccgtcagcatgccagggtcatcccgtccagtctctgatcgaaggggagtttccacagtgattgatgctgcctcaggtagaaaaccacctctgaaatatttattgggcagtcctgtgcatttttaactaattttctcgcacaatgtagaggatgacatttatttgctttcctctctgtttttttgttttgtggtgtgtgtgcattttaatacagtactgtgcctatatttcttgctgaacaatgccatgcttttaagcattcctaaggttggtgaatgatgcagtggagttggcacttgattaaatgtaatgaacatagtattgaaggctacagggttgatgactgttttgcctttgatcactgaaatgtggagaagcaaccttgacagagaac

SEQ ID NO: 6481 - DNA, 329 bp, Homo sapiens
  misc_feature 1..329: note = U/M: U (0.08:0.92) in Fallopian + Ovary Epithelium
  misc_feature 1..329: note = source = chr13:113797654-113797982; Gene: F10 (intron)
  source 1..329: mol_type = genomic DNA
cgtgcgccattccttctgcctgaaaacttttttttcttcaatgtttcattaggaaaagttttccaacacacagcacactggaaagaattttgcagggagtcgcacacgcccagcacttgggttctcctgttggcatcctccggccagatgcattcatcccatttcgcccggcccgtttgtctctgtccatccgtcaagctttcttgacttcttggtgcattttcaggcaaaccgcagacgccaacactcccctcgctgcctgggttgctgcctggcgtccattgttcacaggcggtcacctgaggggaggccaacgctcggacagctgc

SEQ ID NO: 6482 - DNA, 215 bp, Homo sapiens
  misc_feature 1..215: note = U/M: U (0.06:0.89) in Fallopian + Ovary Epithelium
  misc_feature 1..215: note = source = chr10:11405274-11405488; Gene: USP6NL (Intergenic)
  source 1..215: mol_type = genomic DNA
cgcagcagccctggggaagctgtcaccggcagagcaactgcaaggaccagggagctctgcatagaggaagaacgacaatgccacaaacaatagctgagcacaggtagagcgtgaccagggagagcgcggatgctggcgcaggaaggctctgaggaaggctgcacacacaggatggccctctccagcttcacgtcctcagggttacagatacagcc

SEQ ID NO: 6483 - DNA, 249 bp, Homo sapiens
  misc_feature 1..249: note = U/M: U (0.09:0.88) in Fallopian + Ovary Epithelium
  misc_feature 1..249: note = source = chr19:30324602-30324850; Gene: CCNE1 (Intergenic)
  source 1..249: mol_type = genomic DNA
cgcccccacgcaccaagcatcatccctcccaggcagctcctctctgctccagcataaggtggaggacccgcagattcatcccggccaccgccgcccccttgacatttgtccctgggcaacctcaccacctggaagactttgccactgcctctgtgccggcctcacccaagcagggggtctctaccccaatgaggcctgccctggctgcacacctgaatgcccacttgcctgcagggggcctccacctgc

SEQ ID NO: 6484 - DNA, 458 bp, Homo sapiens
  misc_feature 1..458: note = U/M: U (0.14:0.91) in Fallopian + Ovary Epithelium
  misc_feature 1..458: note = source = chr6:37033614-37034071; Gene: FGD2 (Intergenic)
  source 1..458: mol_type = genomic DNA
cgtctggctaatttttgtatttttagtagagaggggggtttcaccatgttggccagattggtcttgaactcctgacctcgagatccgcccacctcggcctcccaaagtgccgggattataggtatgagccaccgcgcctggccaactcattttaataaggaacaaaacaagattgatggaacctgcagcggcagcccatctagagcaatttgtgaagaattaatcttgtgcacgccctaattgaaaagaaccaatgatttacagcagaaacaacaaccaacaccatagacatctcaactggttcaccttacacagttctgactgaaaaattaaagttgagcaaacttcctactccgaagtttgttcccagaagccattgtgcccagatcagctgcagacaacagcagggctttcaatggaaatttcaaacaagtgggatcaagatcctgaagcctctc

SEQ ID NO: 6485 - DNA, 167 bp, Homo sapiens
  misc_feature 1..167: note = U/M: U (0.13:0.89) in Fallopian + Ovary Epithelium
  misc_feature 1..167: note = source = chr10:131647377-131647543; Gene: EBF3 (intron)
  source 1..167: mol_type = genomic DNA
cgcggccataaatcagcggcacatgcgctgtgtacagtgcatgaatcacggccgggactccgtccgactgcacacactgtgtttaacaagctttataaggagccatcgggctttattatggctctgcctgactccaacaaaaactgagcctggaggcccggggacac

SEQ ID NO: 6486 - DNA, 177 bp, Homo sapiens
  misc_feature 1..177: note = U/M: U (0.15:0.9) in Fallopian + Ovary Epithelium
  misc_feature 1..177: note = source = chr7:148901541-148901717; Gene: ZNF282 (intron)
  source 1..177: mol_type = genomic DNA
cgtgttgagggaaggtttttctgaggttggaatgaccctgaaggacggagccagtagagagggagaaactgatgacttagattaagcttcacaggcaggaggtggaggaagaggtgaagggcacataccgtcggccttggatttgcaaggagaggggcaagaaaggagcttgccggc

SEQ ID NO: 6487 - DNA, 250 bp, Homo sapiens
  misc_feature 1..250: note = U/M: U (0.11:0.86) in Fallopian + Ovary Epithelium
  misc_feature 1..250: note = source = chr10:130652036-130652285; Gene: MGMT (Intergenic)
  source 1..250: mol_type = genomic DNA
cggtctgtatggtaacagccccatcaccggcaggacaggccacagccacatggcaatgtggtagttgggggaatatggcaatattctgaaacggcagttctcctaaataaatagcacatcaacttacttaaacctaatcataaatggtacaaattgggcccatgtgcaaacagaaacccgagccgaagtccggagttaaagcaaccattgtttctcgcctgacctgggctgggggaagccttgcgtgtcc

SEQ ID NO: 6488 - DNA, 259 bp, Homo sapiens
  misc_feature 1..259: note = U/M: U (0.15:0.89) in Fallopian + Ovary Epithelium
  misc_feature 1..259: note = source = chr10:131647595-131647853; Gene: EBF3 (intron)
  source 1..259: mol_type = genomic DNA
cgttttccgtggagtcactccacggtgcgtggcacaacataaatcagaggtttttcggagactaataagacctgccaccatctattcattactctgcctgcaatttgggccatcactcattagtaatttgatgattaacacgccccacctcagcaggtgtgcaaggtgcgggggcggacacaaagactgcggcttccggagaggacggctagggggccgcctttgcaagtgctctccaaaataattggtcaccgttctc

SEQ ID NO: 6489 - DNA, 296 bp, Homo sapiens
  misc_feature 1..296: note = U/M: U (0.23:0.95) in Fallopian + Ovary Epithelium
  misc_feature 1..296: note = source = chr9:132633613-132633908; Gene: USP20 (intron)
  source 1..296: mol_type = genomic DNA
cgtgtgtgtcggaatgccctgccttttgtatgctggttatttattgttccattgtgtggatggctggggcctttctgcttattcgttcatccgtcagtggacactcaggccgcttccctgttagctattgtgaggaatgctgctctgaccatgggtgtgcacacctctcttctttcatccctttgggtctatgcctatttttaatttctcgaggagccaccgtactgggttccacagtggccaccccatttcacattcccaccagtgacgcacaagagttccagtttctccacatc

SEQ ID NO: 6490 - DNA, 254 bp, Homo sapiens
  misc_feature 1..254: note = U/M: U (0.27:0.91) in Fallopian + Ovary Epithelium
  misc_feature 1..254: note = source = chr9:90086305-90086558; Gene: DAPK1 (Intergenic)
  source 1..254: mol_type = genomic DNA
cggtggctcacgcctgtaatcccagcactttgggaggccgaggcgggaggatcacgagttcaggagatcgagaccatcttggctaacatgatgaaaccccgtctccactaaaaaaaatacaaaaaattagccaggcgtggcagcgggcacctgtagtcccagctactcaggaggctgaggcaggagaatggcgtgaacccgggaggcagagcttgcagtgagccaagattgtgccactgcactccagcctgggc

SEQ ID NO: 6491 - DNA, 186 bp, Homo sapiens
  misc_feature 1..186: note = U/M: U (0.2:0.83) in Fallopian + Ovary Epithelium
  misc_feature 1..186: note = source = chr22:29155544-29155729; Gene: CCDC117,HSCB (Intergenic,TTS)
  source 1..186: mol_type = genomic DNA
cgatctcagctcactgcaacctccacctccggggttcaagtgattctcctgcctcagcctcccaagtagctgggattacaggcacctgccaccatgcctggacattttttagtatttttagtagagtcggggtttcaccatgttggccagactggtctcgaactcctgacctcaggtgttccaccc

SEQ ID NO: 6492 - DNA, 155 bp, Homo sapiens
  misc_feature 1..155: note = U/M: U (0.02:0.88) in Fallopian + Ovary Epithelium
  misc_feature 1..155: note = source = chr18:74419723-74419877; Gene: LOC100131655 (Intergenic)
  source 1..155: mol_type = genomic DNA
cgagaaatttgagctgaaactcgtcttgcagaaatctcggtctcccttttaaggcattgttttcaatgtaagatggcaaaggcaaatccagtaaaaggttgtggctaataccggacatttacggccctgagaacagtgaaatgcagacggtggcg

SEQ ID NO: 6493 - DNA, 91 bp, Homo sapiens
  misc_feature 1..91: note = U/M: U (0.09:0.94) in Fallopian + Ovary Epithelium
  misc_feature 1..91: note = source = chr1:46963395-46963485; Gene: DMBX1 (Intergenic)
  source 1..91: mol_type = genomic DNA
cgcagccagcagcgatgcggggacataacggatgcatttgcagatttggaaaattaaagccatctatatggcgcctgtggcgggagatccg

SEQ ID NO: 6494 - DNA, 382 bp, Homo sapiens
  misc_feature 1..382: note = U/M: U (0.03:0.87) in Fallopian + Ovary Epithelium
  misc_feature 1..382: note = source = chr1:54009680-54010061; Gene: GLIS1 (intron)
  source 1..382: mol_type = genomic DNA
cgggaggagccgttctggggcgcgcagcccagcccagatgcctggctcagcagagctgcgccacccgactcagagggacgcctggaactcattagcattatgtcaggaataatataaaattaaaacatttagctttggcttctaaaattaaggaggacaaaaagaaaaggatgccattgtgctgaaccgctcggctatgacctgggcaccaataatttacagaaaatagatcactgcattgcacttgggcccagtcaggagcccggggttgccaatagggctgaggactaagagaggagcccgcaactctgctggagatgggagaaggggaaggttgggagccagggtgcagtccggcccccggggcacagtgaggccttcg

SEQ ID NO: 6495 - DNA, 483 bp, Homo sapiens
  misc_feature 1..483: note = U/M: U (0.05:0.89) in Fallopian + Ovary Epithelium
  misc_feature 1..483: note = source = chr1:61913481-61913963; Gene: NFIA (intron)
  source 1..483: mol_type = genomic DNA
cggctcccagagtcgtgcttcattagaaccccgtcataagcggctccagaagggcaggtacgctggtggtgcccggctttgatgtcttgaatgaatgaaagaaaagcacaataaaaaagagctgttgatcaagcataaaatactctttaagctgacagaatagcagcgttaacacaccctaagctgcttttagtttttcccttttttcctcacattttcctgtgctttgtgtacagtgggggtttgtattttataagaagtctctgatctatgtagtatgccattcgctaacaaaaaccaaaataggattgtttctgtcccacttggttgcctgactaccccctcccttcctccccttttctcctcacccccaacctccaaggcgtgcagtttagccttgcaaggcaagggcccaaatgcctttcataaacttgagccaattccttttgtgttgtgggtttcaccgctctgattttaatatcg

SEQ ID NO: 6496 - DNA, 307 bp, Homo sapiens
  misc_feature 1..307: note = U/M: U (0.06:0.89) in Fallopian + Ovary Epithelium
  misc_feature 1..307: note = source = chr22:47441209-47441515; Gene: TBC1D22A (intron)
  source 1..307: mol_type = genomic DNA
cgcggtttggaagtcccattaatgcgacttctctctgagaagtcaacctgggcctcctcactctgcagacgtccagctccctcccggaagcggtcatgcagaggtgtcaggcggcactgttgtaatcgatagtgggtgaccagtctgaataaatttccttgtacttgctccaaagtagacaagagtccttagccacctccagagtttgaattgaatggtaatgacatttcttaaggagagattaaagagttcttttttaatagtaaaaacatgcagcagaacgggcagtgttgttagcgggttagcg

SEQ ID NO: 6497 - DNA, 501 bp, Homo sapiens
  misc_feature 1..501: note = U/M: U (0.06:0.89) in Fallopian + Ovary Epithelium
  misc_feature 1..501: note = source = chr15:101464434-101464934; Gene: LRRK1,LRRK1 (intron,exon)
  source 1..501: mol_type = genomic DNA
cgttgactgaacaatgattgaagctgttaccagtatgtgttttccaattgtctggggtttgtttgagactcttctcaggtagacaatacctgagccccgcatcaagatgggatggggggagctgtgccttcccactgaccacacctgatgggtttggctggatagatggactacaaaaaggaatgttgcagagggaaaactaaatgaacccatgcaaatatttgcaggggaggaggacaggaattataaaggctttctgttttgattgtttttcgccaccagagcaagaaagctttctgctcagccatggctacgagtccacgccttaatgcaccccacagccagcggcagtggcagtgacaacagcgggacctgcctttgaagatcggctgctgcaagggttgatggctggcatgtcgcaaagaccccccagcatgtactggtgtgtggggccggaggagtcagctgtgtgtccagaacgtgccatggagacgcttaacg

SEQ ID NO: 6498 - DNA, 143 bp, Homo sapiens
  misc_feature 1..143: note = U/M: U (0.02:0.84) in Fallopian + Ovary Epithelium
  misc_feature 1..143: note = source = chr6:152125965-152126107; Gene: ESR1 (promoter-TSS)
  source 1..143: mol_type = genomic DNA
cgtgggcactctaggagcacctcagtattgcgtgttagtactatggccgagagaatagttgagaaagtggtcaagaggtggatccatgtgaacgccactgggaaatgagagacctcgttcccaatcacggtcagtgcaactcg

SEQ ID NO: 6499 - DNA, 416 bp, Homo sapiens
  misc_feature 1..416: note = U/M: U (0.03:0.85) in Fallopian + Ovary Epithelium
  misc_feature 1..416: note = source = chr14:105688243-105688658; Gene: BRF1 (intron)
  source 1..416: mol_type = genomic DNA
cggtggagcctaggtgtacacaatccacctgttaaccaggcagagggccagggtgcccgcttttgtgacaaaaaacaatgctaccaagctgccaggtaacccatagaacggctgtcagtgcacggtgcctggcggtcaggtgccaaagaacgagcctcagcccacacctcgcactgcacgcggaagttagctcaaagcagatcacagacctagggggagagttaaagtacagacatttcagacaaaaacgtaaaagaaaaactttgtgaccttggataaggcaaacatttctaatggttctaaaagcagaatccataaaacactgataaaacggatttccaaaaaattaagaactgccctttgaaagacatcgttaagacaatgaagacagcccacaggcttatctgcaaatctcg

SEQ ID NO: 6500 - DNA, 327 bp, Homo sapiens
  misc_feature 1..327: note = U/M: U (0.09:0.9) in Fallopian + Ovary Epithelium
  misc_feature 1..327: note = source = chr19:36531417-36531743; Gene: THAP8 (intron)
  source 1..327: mol_type = genomic DNA
cgaggttgcaccatgttggccaggctggtcttgaactcctgacctcaggtgatccacccaccttggcctcccaaagtgctaggattataggcatgagccaccaagcctggcatttcttcttattattattaatttgaaagctccaccttttaaacacccagcatcagcccacctctgccccctccactgcccctccttccagcctccttcctggtcttcctgcccacagtcccgcccctccactcccaatttgttcttccacatcaacttgttggagcagtttataaaatcagacagttacgatgtgggagatcgtgcagccaagcg

SEQ ID NO: 6501 - DNA, 339 bp, Homo sapiens
  misc_feature 1..339: note = U/M: U (0.08:0.87) in Fallopian + Ovary Epithelium
  misc_feature 1..339: note = source = chr18:74167957-74168295; Gene: ZNF516 (intron)
  source 1..339: mol_type = genomic DNA
cggcatcctcaaacagtcaggtatcgtctgtaactcaaggaggatggtaggacccatcaataatgagatgccaccaaactcactccttcctttgtcactccagataaagacagcatcagtgctcgcccctcttctcaggagccctggcgaacgtgaaacaatagatgctcactttagctcacgctcctggcctgacttctttggcagcttaaactgctcaagcagaacctttttctgccttgctaactctggggcgatgagcagtagtgcctattcagggaccttgctgcaaaacaaaatctggatgactaagaattggaggcaagagagataagcacg

SEQ ID NO: 6502 - DNA, 142 bp, Homo sapiens
  misc_feature 1..142: note = U/M: U (0.12:0.89) in Fallopian + Ovary Epithelium
  misc_feature 1..142: note = source = chr11:112370637-112370778; Gene: C11orf34 (Intergenic)
  source 1..142: mol_type = genomic DNA
cggccaggggtagagaccttcccggaaggcgaagatcgcataggtaactgggaaagtgtgttttttgaggtgggggaaccccatgcagccaggtcagggctgcagggtaggccgcctgccccacaatcagagcactgcctcg

SEQ ID NO: 6503 - DNA, 469 bp, Homo sapiens
  misc_feature 1..469: note = U/M: U (0.06:0.83) in Fallopian + Ovary Epithelium
  misc_feature 1..469: note = source = chr6:2867896-2868364; Gene: MGC39372 (intron)
  source 1..469: mol_type = genomic DNA
cgattttctgttgcatgaaatatgcataggcacgagagctctgatttagcagctaaaaacatgaagatccagaaatactttatttcatgcatcttttcttctcccaaccctattctggctgaaatcgactaaaatgaataccactggcaaccttgttcgtgggatattgtacaagaatgagctcttaaatcaatgtgtcagaaaatgaaggagacacaatgctgaggtggtgttctggattaaaagaattttaagcaacatcacaatgaaatttgatgcataacccttgaatggattcttgctcaaataaacaagctataaaagtatctccaagaccgctggaaaatttgaatatggattcagtatgacaaactaattgttcattttaataagtatgaggtattacggttacataggaaaatgcccttttaaaaaataaaaaatgcacatttaggggtatataaaaacg

SEQ ID NO: 6504 - DNA, 191 bp, Homo sapiens
  misc_feature 1..191: note = U/M: U (0.09:0.84) in Fallopian + Ovary Epithelium
  misc_feature 1..191: note = source = chr20:39542122-39542312; Gene: TOP1 (Intergenic)
  source 1..191: mol_type = genomic DNA
cgctgagaaagtcgtccctgggcgggggaagctggctctttgcttcccctcgggcccatgagccattgtccccaaccagcgaggcgcatcttagaagcaccatctcctcgggctcttttcctgctctgcctggattgggctcatttactaaaaattagttgggaatgaaaaaagcccttagtttattagcg

SEQ ID NO: 6505 - DNA, 230 bp, Homo sapiens
  misc_feature 1..230: note = U/M: U (0.06:0.81) in Fallopian + Ovary Epithelium
  misc_feature 1..230: note = source = chr9:90928169-90928398; Gene: SPIN1 (Intergenic)
  source 1..230: mol_type = genomic DNA
cgagagcttgtccctgtctggttgcacctggtagcaacctatcccattgaaccactgtcagaccctctggagggtctaatatgggtgatccataacacaagggggatttacgtttagcccctcacagaaggtcacttacaacttggcacatctggtgcactgataaagaggggattgatttgcaaggcaggggcggcccacgcaggacttcgcagacttttcaggtgacg

SEQ ID NO: 6506 - DNA, 195 bp, Homo sapiens
  misc_feature 1..195: note = U/M: U (0.18:0.92) in Fallopian + Ovary Epithelium
  misc_feature 1..195: note = source = chr14:30383284-30383478; Gene: PRKD1 (intron)
  source 1..195: mol_type = genomic DNA
cgttagaatcgaactgaattgtgaatgtgctttaggtcaagtcatctctctttatatatagacacacttacatctacatttttgtaaagtttgaggaaagtacaattagtctacgagggaagttacgtgttggcattagccctggacacagacaatgtgaaaggatgcaaggcaattcacaattcaattcaaccg

SEQ ID NO: 6507 - DNA, 294 bp, Homo sapiens
  misc_feature 1..294: note = U/M: U (0.16:0.89) in Fallopian + Ovary Epithelium
  misc_feature 1..294: note = source = chr22:29586131-29586424; Gene: EMID1 (Intergenic)
  source 1..294: mol_type = genomic DNA
cggggaaaaggtcagtgtggtgggaacagggtgcctgagatgccagcagggccgggcaatggagctttgcaggtcaagcgtgagctgcttccagatgccctgggagccactgtgagactccaagtagcagggtacgtgggtctggcctcctctggctgcaagggctggagaccgaggacgcctagagaccagggcagggtgacccagcttgaacaatggaggttggggtagggaggtgcagtgggttgaatggtggcccccaccaaaacataggtccatgtccaggaacctgcg

SEQ ID NO: 6508 - DNA, 453 bp, Homo sapiens; identical to SEQ ID NO: 2031
  misc_feature 1..453: note = U/M: U (0.2:0.93) in Fallopian + Ovary Epithelium
  misc_feature 1..453: note = source = chr14:75363159-75363611; Gene: DLST (intron)
  source 1..453: mol_type = genomic DNA

SEQ ID NO: 6509 - DNA, 155 bp, Homo sapiens
  misc_feature 1..155: note = U/M: U (0.2:0.9) in Fallopian + Ovary Epithelium
  misc_feature 1..155: note = source = chr22:39432912-39433066; Gene: APOBEC3F (Intergenic)
  source 1..155: mol_type = genomic DNA
cgggagactgaggcaggagaatcacttgaacccaggaggcagaggttgcagtgagccaagatcacgccactgcactccagtctgggcgacacagcaagactccgtctcaaaaaaaagaaaagaaatacttcggattgctccagaaaggtcggacg

SEQ ID NO: 6510 - DNA, 134 bp, Homo sapiens
  misc_feature 1..134: note = U/M: U (0.22:0.91) in Fallopian + Ovary Epithelium
  misc_feature 1..134: note = source = chr12:131615178-131615311; Gene: GPR133 (intron)
  source 1..134: mol_type = genomic DNA
cgggctcagcagttgcttcagaaaggcctggcgcgggcacctaggcgaggggtgcaggtgtgcggaacagcgatgctggcccatcccgtgcgggggaagagcgaggccggcccatcccgtgcggggggagagcg

SEQ ID NO: 6511 - DNA, 193 bp, Homo sapiens
  misc_feature 1..193: note = U/M: U (0.24:0.93) in Fallopian + Ovary Epithelium
  misc_feature 1..193: note = source = chr9:88490951-88491143; Gene: NAA35 (Intergenic)
  source 1..193: mol_type = genomic DNA
cgctccaatagctaaattaaattaataggaattttttttttttttttttgagacagagtctcgctctgttgcccagcctggagtgcagtggcgcaatctcggcttaccgcaagctccacctcctgggttcacgccattctcctgcctcagcctcccgagtagctgggactataggtccccaccaccgcacccg

SEQ ID NO: 6512 - DNA, 413 bp, Homo sapiens
  misc_feature 1..413: note = U/M: U (0.18:0.84) in Fallopian + Ovary Epithelium
  misc_feature 1..413: note = source = chr10:80232442-80232854; Gene: LINC00595 (Intergenic)
  source 1..413: mol_type = genomic DNA
cggtggaggcccgctctaatgagtgtgcagctttcgctgccctcagaaatcaggcgctggctctgggcactcggcagccagatgattgaaagcccagtagggctcccagccctcccccacccccactctcttttttgtgtgttgtctgcatcactgcccagaccaatctctcttcatgctgaattttttaaagccaaattggaaaaaaattggaagtagcctgcatgctattccccctgggctccaaatgggctctccagttaggggaacaaaatacaccattttaatttataataataataattattattatcattatccataacaataacaataccaataatcccatgcatgggtaggccaatgtacagcgcataaagtgcttttccagctgtgatttcatttgggcctcg

SEQ ID NO: 6513 - DNA, 237 bp, Homo sapiens
  misc_feature 1..237: note = U/M: U (0.26:0.9) in Fallopian + Ovary Epithelium
  misc_feature 1..237: note = source = chr19:418507-418743; Gene: SHC2 (intron)
  source 1..237: mol_type = genomic DNA
cgggacattatccagccgagaacaggagccaggctctggcccgggccacggcgcaatgcccctggaggacgtcacgctcagtgagagacgccagacacagaaggacacacagcgtggaatcccattgctatgaaatgtccaggacaggcccatccacagagacaggaggcggatgtgtggggttggagctggggaggggacagggagtgacggctggtggggacagggcttctttcg

SEQ ID NO: 6514 - DNA, 90 bp, Homo sapiens
  misc_feature 1..90: note = U/M: U (0.3:0.92) in Fallopian + Ovary Epithelium
  misc_feature 1..90: note = source = chr20:36990773-36990862; Gene: LBP (intron)
  source 1..90: mol_type = genomic DNA
cgcaatctcggctcactgcaagcttcgcctcgcgatttcacgccattctcctgtctcagcctcgcgagtagctgggactacaggcgcccg

SEQ ID NO: 6515 - DNA, 262 bp, Homo sapiens
  misc_feature 1..262: note = U/M: U (0.34:0.9) in Fallopian + Ovary Epithelium
  misc_feature 1..262: note = source = chr21:33897933-33898194; Gene: TCP10L (Intergenic)
  source 1..262: mol_type = genomic DNA
cggccctgtgcacagacacctaaggcccgcctcttagggtcagcttgccctcaaaaagagaagaaagcataggtttccaggactggctgatgaagggagggtttgggatttctggagacttgaagttgagcttgaattcctcccctctgactttcccaggccaaggcgtccagcacccagggaccaagccctggtcctcagcagagaccgtctgcagcccctgccctggtctcgctaacactggtttaatatatctacaacg

SEQ ID NO: 6516 - DNA, 277 bp, Homo sapiens
  misc_feature 1..277: note = U/M: M (0.84:0.14) in Fallopian + Ovary Epithelium
  misc_feature 1..277: note = source = chr1:42357334-42357610; Gene: HIVEP3 (intron)
  source 1..277: mol_type = genomic DNA
cggcactccccagaagtccttggtaactcactttctctttctgttctgaacatccattcgggctggtttaaagcacagctcgctcaagaggcagccctccagaggagatcggggttaattacgtttactgacagctgtcttctttctcctacagtcacttcttcccatgtcctgatttcattgcttgtgaaaagagatggccttccaatgggaaaaggcaaggagtaaaactcacgagagaaagcgtcctggagattttaaggagaaaggcacatcg

SEQ ID NO: 6517 - DNA, 217 bp, Homo sapiens
  misc_feature 1..217: note = U/M: M (0.76:0.1) in Fallopian + Ovary Epithelium
  misc_feature 1..217: note = source = chr2:233246379-233246595; Gene: ALPP (exon)
  source 1..217: mol_type = genomic DNA
cgcctgcgacctggcgccccccgccggcaccaccgacgccgcgcacccggggcggtccgtggtccccgcgttgcttcctctgctggccgggaccctgctgctgctggagacggccactgctccctgagtgtcccgtccctggggctcctgcttccccatcccggagttctcctgctccccacctcctgtcgtcctgcctggcctccagcccgagtcg

SEQ ID NO: 6518 - DNA, 105 bp, Homo sapiens
  misc_feature 1..105: note = U/M: M (0.77:0.22) in Fallopian + Ovary Epithelium
  misc_feature 1..105: note = source = chr10:22725538-22725642; Gene: LOC100499489 (exon)
  source 1..105: mol_type = genomic DNA
cgtcagtaggcctggacctgctggcacccgctgtcaagatagggcctggcgtcgcggcgaggcatcagctcgggcagaagcacagcccaggaagtgggcgcgtcg

SEQ ID NO: 6519 - DNA, 148 bp, Homo sapiens
  misc_feature 1..148: note = U/M: M (0.7:0.18) in Fallopian + Ovary Epithelium
  misc_feature 1..148: note = source = chr5:148521594-148521741; Gene: ABLIM3 (exon)
  source 1..148: mol_type = genomic DNA
cggaagatttaaaaagcagccggggcctccgtattgaatgaaagacccagtgcaaagacatcaccatgaacactagcagtaagtggatcctcctctcctttgccatgggaacaggggtgggggcgggaggtgagggagcctgcgctcg

SEQ ID NO: 6520 - DNA, 293 bp, Homo sapiens
  misc_feature 1..293: note = U/M: M (0.67:0.15) in Fallopian + Ovary Epithelium
  misc_feature 1..293: note = source = chr2:164205032-164205324; Gene: FIGN (Intergenic)
  source 1..293: mol_type = genomic DNA
cggccacggcagctgcttctgccttgactgctgcccctgacccttctgctgtttcttccttgattttagcatcagctttttcttcttcttcttttttccccaccccggcagcacctcttgtaaaaagcagaaatagcctctacatttgccagagagcgtgggtgcagggaggggaggctaaggtggagtcgttagggtctctaacgaggcttggttcctggggcccctcctgtcttttctcccgctcccgttagcattttccttcctgcggtagcaatgctttgtcagcctcg

SEQ ID NO: 6521 - DNA, 41 bp, Homo sapiens
  misc_feature 1..41: note = U/M: M (0.62:0.15) in Fallopian + Ovary Epithelium
  misc_feature 1..41: note = source = chr5:124071085-124071125; Gene: ZNF608 (intron)
  source 1..41: mol_type = genomic DNA
cgggaacgcgcagccccgggcccgaggtgccagcggccacg

SEQ ID NO: 6522 - DNA, 141 bp, Homo sapiens; identical to SEQ ID NO: 2053
  misc_feature 1..141: note = U/M: M (0.64:0.2) in Fallopian + Ovary Epithelium
  misc_feature 1..141: note = source = chr5:87066677-87066817; Gene: CCNH (Intergenic)
  source 1..141: mol_type = genomic DNA

SEQ ID NO: 6523 - DNA, 84 bp, Homo sapiens; identical to SEQ ID NO: 1900
  misc_feature 1..84: note = U/M: M (0.62:0.26) in Fallopian + Ovary Epithelium
  misc_feature 1..84: note = source = chr10:62761559-62761642; Gene: RHOBTB1 (promoter-TSS)
  source 1..84: mol_type = genomic DNA

SEQ ID NO: 6524 - DNA, 142 bp, Homo sapiens; identical to SEQ ID NO: 400
  misc_feature 1..142: note = U/M: M (0.62:0.27) in Fallopian + Ovary Epithelium
  misc_feature 1..142: note = source = chr19:49112138-49112279; Gene: FAM83E (intron)
  source 1..142: mol_type = genomic DNA

SEQ ID NO: 6525 - DNA, 184 bp, Homo sapiens
  misc_feature 1..184: note = U/M: M (0.6:0.29) in Fallopian + Ovary Epithelium
  misc_feature 1..184: note = source = chrX:129306199-129306382; Gene: RAB33A (exon)
  source 1..184: mol_type = genomic DNA
cgcttctgcgggggtaccttcccagacaagactgaagccaccatcggcgtggacttcagggagaagaccgtggaaatcgagggcgagaagatcaaggtgatccagggggtcaggtccaggaagggtgggacccgggaggggacctcgcccgaggcatagctctagcggttgtcgtcgtccagcg

SEQ ID NO: 6526 - DNA, 103 bp, Homo sapiens; identical to SEQ ID NO: 1905
  misc_feature 1..103: note = U/M: M (0.51:0.22) in Fallopian + Ovary Epithelium
  misc_feature 1..103: note = source = chr7:94023466-94023568; Gene: COL1A2 (promoter-TSS)
  source 1..103: mol_type = genomic DNA

SEQ ID NO: 6527 - DNA, 66 bp, Homo sapiens; identical to SEQ ID NO: 1904
  misc_feature 1..66: note = U/M: M (0.54:0.27) in Fallopian + Ovary Epithelium
  misc_feature 1..66: note = source = chr8:16801894-16801959; Gene: FGF20 (Intergenic)
  source 1..66: mol_type = genomic DNA

SEQ ID NO: 6528 - DNA, 144 bp, Homo sapiens
  misc_feature 1..144: note = U/M: M (0.87:0.16) in Fallopian + Ovary Epithelium
  misc_feature 1..144: note = source = chr5:92935126-92935269; Gene: MIR548AO (intron)
  source 1..144: mol_type = genomic DNA
cgtttaaggctgataatatcattgcacagccagataaataaagcgttggcccaaccgtggggtcagcgatcgatctctgggctcagaggaaagaggagagagacagggtcgtgcacgaggctctgtctgtgtgcttgtcagtcg

SEQ ID NO: 6529 - DNA, 85 bp, Homo sapiens
  misc_feature 1..85: note = U/M: M (0.85:0.2) in Fallopian + Ovary Epithelium
  misc_feature 1..85: note = source = chr5:92938149-92938233; Gene: MIR548AO (intron)
  source 1..85: mol_type = genomic DNA
cgccggcgtcctcgagcgacgcagggcaaatgaggacgcttcctgagcatatttctaggctgggaaccccgctgaaatttccgcg

SEQ ID NO: 6530 - DNA, 316 bp, Homo sapiens
  misc_feature 1..316: note = U/M: M (0.74:0.11) in Fallopian + Ovary Epithelium
  misc_feature 1..316: note = source = chr2:233284319-233284634; Gene: ALPPL2 (Intergenic)
  source 1..316: mol_type = genomic DNA
cgcagagatcagcggcgaacaccagccccgaccgcaggctcacctcacgcagggttccagcgcggcagcccaggtcctggtggcgctgctccttgagagaagcctgggcggcagaaaggcccttgcacgatccccgcgccacagcagcttaggtacttgacctcctggaacgcgtcgtagtgcgccgtcagcgaataccgggctccatggcaccgaggccgccgcgatgcagccctgggccacctgggctatgggatgcgcgcggccgctggcctcctagtgggcctctgcatggccccggggggccaaagctgcg

SEQ ID NO: 6531 - DNA, 75 bp, Homo sapiens
  misc_feature 1..75: note = U/M: M (0.82:0.23) in Fallopian + Ovary Epithelium
  misc_feature 1..75: note = source = chr5:92906434-92906508; Gene: FLJ42709 (promoter-TSS)
  source 1..75: mol_type = genomic DNA
cgacgtctcagtgcgcagataccgcggcccgggcccctccgccgcgcgggggaccgcactagcgtcgacctcccg

SEQ ID NO: 6532 - DNA, 85 bp, Homo sapiens; identical to SEQ ID NO: 1909
  misc_feature 1..85: note = U/M: M (0.68:0.09) in Fallopian + Ovary Epithelium
  misc_feature 1..85: note = source = chr5:138923135-138923219; Gene: UBE2D2 (Intergenic)
  source 1..85: mol_type = genomic DNA

SEQ ID NO: 6533 - DNA, 181 bp, Homo sapiens
  misc_feature 1..181: note = U/M: M (0.66:0.08) in Fallopian + Ovary Epithelium
  misc_feature 1..181: note = source = chr2:233284129-233284309; Gene: ALPPL2 (Intergenic)
  source 1..181: mol_type = genomic DNA
cgcttcagtcagcagccgcagacgaaaaagtagaagttctggtacgagtccatgctggcgtccaggttggctgccaggaggccggcggcgcgcgctaaggccttgccctcggggcagctctcgggacaggcgccgccgcccgccgcgaccgggcccaggtacttgagcgccagcatagccg

SEQ ID NO: 6534 - DNA, 220 bp, Homo sapiens; identical to SEQ ID NO: 1915
  misc_feature 1..220: note = U/M: M (0.64:0.08) in Fallopian + Ovary Epithelium
  misc_feature 1..220: note = source = chr2:54798129-54798348; Gene: SPTBN1 (intron)
  source 1..220: mol_type = genomic DNA

SEQ ID NO: 6535 - DNA, 130 bp, Homo sapiens
  misc_feature 1..130: note = U/M: M (0.7:0.16) in Fallopian + Ovary Epithelium
  misc_feature 1..130: note = source = chr2:233284661-233284790; Gene: ALPPL2 (Intergenic)
  source 1..130: mol_type = genomic DNA
cgcagcagcccgacggggctcccaggcaccgcgaggagagacgcaggcctgggtgcagaggccccagctgccggcctcattcactgcggaaaccagggacgaggagagtctggcggggccaccatccccg

SEQ ID NO: 6536 - DNA, 127 bp, Homo sapiens
  misc_feature 1..127: note = U/M: M (0.7:0.18) in Fallopian + Ovary Epithelium
  misc_feature 1..127: note = source = chr12:85671785-85671911; Gene: ALX1 (Intergenic)
  source 1..127: mol_type = genomic DNA
cgtttccacaaggctgcccgggggcccgctggaaagtgtccaaagaacgcagagctgaggctactgctcacgcaaggtcgggatgctacaggacactttaagaagagcgtttcaatggcttcttccg

SEQ ID NO: 6537 - DNA, 28 bp, Homo sapiens
  misc_feature 1..28: note = U/M: M (0.73:0.24) in Fallopian + Ovary Epithelium
  misc_feature 1..28: note = source = chr7:28995391-28995418; Gene: TRIL (exon)
  source 1..28: mol_type = genomic DNA
cggcggacacgccggtgcccatggagcg

SEQ ID NO: 6538 - DNA, 189 bp, Homo sapiens
  misc_feature 1..189: note = U/M: M (0.66:0.23) in Fallopian + Ovary Epithelium
  misc_feature 1..189: note = source = chr12:34261382-34261570; Gene: ALG10 (Intergenic)
  source 1..189: mol_type = genomic DNA
cgtgtgcgctgtggtgggtccctgctaggggcgaccctatgggccagcttcccacgcctggtccccaagccgcacccaccctagctccctgggctaggggactggctcctcctgggggccgtgcggtgggaggcaggggcgttaggggagagggaggggtcgagggcagcccctgctctgtgcacagcg

SEQ ID NO: 6539 - DNA, 223 bp, Homo sapiens; identical to SEQ ID NO: 2066
  misc_feature 1..223: note = U/M: M (0.58:0.15) in Fallopian + Ovary Epithelium
  misc_feature 1..223: note = source = chr3:151985697-151985919; Gene: MBNL1 (promoter-TSS)
  source 1..223: mol_type = genomic DNA

SEQ ID NO: 6540 - DNA, 99 bp, Homo sapiens
  misc_feature 1..99: note = U/M: M (0.64:0.27) in Fallopian + Ovary Epithelium
  misc_feature 1..99: note = source = chrX:21676306-21676404; Gene: KLHL34,KLHL34 (promoter-TSS,exon)
  source 1..99: mol_type = genomic DNA
cgagttgccggtggactccgggggtgctggatgtccgacggcgcagatgcggcgtcccgggagtgcagggcgaggactctgacctctccggggtggacg

SEQ ID NO: 6541 - DNA, 154 bp, Homo sapiens
  misc_feature 1..154: note = U/M: U (0.03:0.93) in Gastric + Small Intes. + Colon Epithelium
  misc_feature 1..154: note = source = chr17:10704453-10704606; Gene: LINC00675 (intron)
  source 1..154: mol_type = genomic DNA
cgcctcccgggttcacgccattctcctgcctcagcctcccaagtagctgggattacaggcgcctgccactgcgcccggctaattttttgtatttttagtagagacagggtttcactgtggtctcgatctcctgacctcgtgatctgcccacctc

SEQ ID NO: 6542 - DNA, 303 bp, Homo sapiens
  misc_feature 1..303: note = U/M: U (0.02:0.89) in Gastric + Small Intes. + Colon Epithelium
  misc_feature 1..303: note = source = chr3:18664732-18665034; Gene: SATB1 (Intergenic)
  source 1..303: mol_type = genomic DNA
cgcaatcacaggaatgaatctcataaatagaaattgaagtaaaagaaaccagatgcaagaaacacagttaataatttacctaaataaaattttaaaaacaggccaaagtaatctatagtgataaaagtctgaatagcgctttgtgtgtgcacggtatggcggtgggtaaaaggagaggcatagggaggcacctgagcgctagtaatctctatttcttaatcttgatggtggttaaccaggtatgattacatggtaaaaacactttgagctgcacccttatagtttttgcacttttctgtctgc

SEQ ID NO: 6543 - DNA, 225 bp, Homo sapiens
  misc_feature 1..225: note = U/M: U (0.06:0.92) in Gastric + Small Intes. + Colon Epithelium
  misc_feature 1..225: note = source = chr5:98112561-98112785; Gene: RGMB (intron)
  source 1..225: mol_type = genomic DNA
cgggcagatcacctgaggttgggagttcaagacctgcctgaccaacatggagaaaccctgtctctactaaaaatacaaaattagccgggtgtggtggcgcgtgcctgtaatcccagctactagggaggctgaggtaggagaatcgcttgaacctgggaggcggaggttgcagtgagccgagatcgcgccactgctctccagcctgggcaacaagagcaagactcc

SEQ ID NO: 6544 - DNA, 414 bp, Homo sapiens
  misc_feature 1..414: note = U/M: U (0.04:0.9) in Gastric + Small Intes. + Colon Epithelium
  misc_feature 1..414: note = source = chr19:19691202-19691615; Gene: PBX4 (intron)
  source 1..414: mol_type = genomic DNA
cggggtctcctatgctactggcctcctgaccagtgacccttagaaagaacggggccactggccacagttctgccggtgggacccagcgtggtaactgggacctgggctgaggttaactttcctgttccagttttcagaaggagagctcaacttccatcagctccagcttatcttgtagtcaaagagccaaaggtaataaggaaatgagttctacaaggcattctggcaaggtgctcaccaggagccactttcatttgtagtgagagtgtttcctccctaaacaaggcctctgatattggaggacagggataggggaggcaggtggtaaataaccttctgtacttagacctcaactgcttaaaagaaaaaacaccagctactggggaggtcactcaggcaggagtgcagtggcac

SEQ ID NO: 6545 - DNA, 491 bp, Homo sapiens
  misc_feature 1..491: note = U/M: U (0.02:0.88) in Gastric + Small Intes. + Colon Epithelium
  misc_feature 1..491: note = source = chr8:128582449-128582939; Gene: LOC727677 (Intergenic)
  source 1..491: mol_type = genomic DNA
cgcagatgcagataaaggcagattgcgagattccatacctgcaatcagatggctcagattcctctgcggggtcaaatgccaccacaaatgtcttttttatatagactgaaggagctgataatgtaaaccttaacaacccgggcagggcccttttcatctccctgatcacactcatctcaggatgaaatgggccgcagggaagggttcacaactcaactctcaactccaaagtttcctgaaagataaccccacaccttgtgcaaagttatgacaggaagccccacaaggcctttgtgataagctctcccagcacattgctggggacccacaattgtttggcaaaggggtggtgtccactgcttcaactgtgactttggaccagagagttgtaacagacaaatgtggctcaggcccggcaaccgtgctctgccttatgtcagggactggctgagattacttcaagagggaaattgttgatactaaacccctac

SEQ ID NO: 6546 - DNA, 252 bp, Homo sapiens
  misc_feature 1..252: note = U/M: U (0.06:0.91) in Gastric + Small Intes. + Colon Epithelium
  misc_feature 1..252: note = source = chr19:50680078-50680329; Gene: IZUMO2 (Intergenic)
  source 1..252: mol_type = genomic DNA
cgatctctgacctcacgatctgcccgcctcggcctcccaaattgctggaattacaggcttgagccactgcgcccagcctatttctcctttatcttaaagttatttgattttttaaagttatgtgtgtaaatagtttagattacccatggactttattccagcagagtacagaggaaaaacaggacatttgtaataaaagggggaccttggcatacccaaccatgatgcacatgtatgttcaccaaaatccac

SEQ ID NO: 6547 - DNA, 386 bp, Homo sapiens
  misc_feature 1..386: note = U/M: U (0.03:0.88) in Gastric + Small Intes. + Colon Epithelium
  misc_feature 1..386: note = source = chr12:33051893-33052278; Gene: PKP2 (Intergenic)
  source 1..386: mol_type = genomic DNA
cgctgctgtgaagaactacatgagactgggtaatttataaagaggtttaattgactcacagttcctcaaggctggggaggcctcaggaaacttagaatcatggcaagaaggcaccttctcacagggtggcaggagagagaatgaaagctgagcaaaggggcagaagtcccttataaaaccatccaccccatgagtcaattacctcccactgggtccctcccatgacacaaggggattacgggaactacaattcaagatgagatttgggtgcggatacagtcaaaccatatcaatagtgttgttataaaagttaaacaataagtagtacattagatatgttcagcgtccccagagatccacttccttttcttttcttttctttttgc

SEQ ID NO: 6548 - DNA, 265 bp, Homo sapiens
  misc_feature 1..265: note = U/M: U (0.08:0.92) in Gastric + Small Intes. + Colon Epithelium
  misc_feature 1..265: note = source = chr3:23550224-23550488; Gene: UBE2E2 (intron)
  source 1..265: mol_type = genomic DNA
cgcactctaaatggaagtttgtgttggttgatattactgtcagcataactgggaggggtagataggcctaaattccttcacgatggatgttcttccgcggagaagttatgtgaacaggggagactgaagtgagacattcagaagcttggaaaatgaggatcttctttgccttcagggctcagaaaaggttcaactcacttaccaaagaggggtgacttttctaaggaaagattcacagatgacacaagtgataccctcccctcac

SEQ ID NO: 6549 - DNA, 165 bp, Homo sapiens
  misc_feature 1..165: note = U/M: U (0.12:0.96) in Gastric + Small Intes. + Colon Epithelium
  misc_feature 1..165: note = source = chr11:4129491-4129655; Gene: RRM1 (intron)
  source 1..165: mol_type = genomic DNA
cgtgtatatctggacagattagagaccagttttaactttaggtaatataatgattaggccgggcgcggtagctcacgcctgtaatcccagcactttgagaggctgaggcgggtggatcacggggtcaggagatccagaccatcctggctaacacggtgaaacccc

SEQ ID NO: 6550 - DNA, 86 bp, Homo sapiens
  misc_feature 1..86: note = U/M: U (0.07:0.89) in Gastric + Small Intes. + Colon Epithelium
  misc_feature 1..86: note = source = chr18:2639105-2639190; Gene: CBX3P2 (Intergenic)
  source 1..86: mol_type = genomic DNA
cgtatgttcataaaaggtgatagtggccgggcgtggtggctcagtcctgtaatcccagcactttgggaagccgaggcaaatgcatc

SEQ ID NO: 6551 - DNA, 374 bp, Homo sapiens
  misc_feature 1..374: note = U/M: U (0.11:0.91) in Gastric + Small Intes. + Colon Epithelium
  misc_feature 1..374: note = source = chr2:58008344-58008717; Gene: VRK2 (Intergenic)
  source 1..374: mol_type = genomic DNA
cgggtgtgttggtaagcacctgtaatcccagctactcgggaggctgaggcacaagaatagcttgaacccgggaggcggaggttgcagtgagtggagattgcaccactgtactccagcctgggcaacagagtgagactgtctcaaaaagataaaataaaataaaattatttttatactgccttaagatctatcttatcttatataaatatacctatcccagattttgttggttaatgtttgcctggtacttttttttcactacttaagtttcatgcttttttttttttttttttttttttgagatggagtcttgctctgtcacccaggctgaagtgcagtggcacaatcttggcttactgcaagctccacctccc

SEQ ID NO: 6552 - DNA, 99 bp, Homo sapiens
  misc_feature 1..99: note = U/M: U (0.14:0.94) in Gastric + Small Intes. + Colon Epithelium
  misc_feature 1..99: note = source = chr8:8733962-8734060; Gene: MFHAS1 (intron)
  source 1..99: mol_type = genomic DNA
cggccgggcgtggtggcacatgcctataatcccagcactttgggaggatgaggcaggcagactgcctcaggtcagcagttcgagaccagtgtggctaac

SEQ ID NO: 6553 - DNA, 303 bp, Homo sapiens
  misc_feature 1..303: note = U/M: U (0.05:0.84) in Gastric + Small Intes. + Colon Epithelium
  misc_feature 1..303: note = source = chr2:131926142-131926444; Gene: POTEE (Intergenic)
  source 1..303: mol_type = genomic DNA
cgatccttctgcctcagcctcctaaagtgctaggattacaggcgcatgccatctcatctggcccaaaggaaaacttcttgaaggaaactaaggtgctactccagtaaacacacaaacgataagaaagtgaaacagccttattgctgatatggagtaagttttagtggcctggataaaagatcaaaccagctatagcattcccttaagtcaaagattaatccagtgtgaggtcctacgtaactctttaattctatgaaggctgagccaggtgaggaagctgcagaagaaaagtctgaagccagc

SEQ ID NO: 6554 - DNA, 133 bp, Homo sapiens
  misc_feature 1..133: note = U/M: U (0.12:0.87) in Gastric + Small Intes. + Colon Epithelium
  misc_feature 1..133: note = source = chr12:124723205-124723337; Gene: ZNF664-FAM101A (intron)
  source 1..133: mol_type = genomic DNA
cgagtgacccacgtttcctttgtctgcttttgacccgtccactcctttcaggacccctggtcaagccagcctctgcccacagcccgggactgacagcactctccaaaattcaccgggatcttcatctcaccac

SEQ ID NO: 6555 - DNA, 311 bp, Homo sapiens
  misc_feature 1..311: note = U/M: U (0.15:0.88) in Gastric + Small Intes. + Colon Epithelium
  misc_feature 1..311: note = source = chr2:233459533-233459843; Gene: EFHD1 (Intergenic)
  source 1..311: mol_type = genomic DNA
cgcacctggccctagatcttgatttctaaatacagttatccaatacaaggaaccagactccttggtgaaagagctgattatagggctgggcaggaaaaatataagataagcctggagcattttatagagccggaaagttaaggagtgctaagaacaaggcccagcgcagtggctcactcctgtaatcccagcactttgggaggccaaggtgggcagatcacctgaagccaggagctcgagaccagcctggccaacatggtgaaaccccgtctctactaaaaatacaaaaattagctgggtgtaggtggcac

SEQ ID NO: 6556 - DNA, 327 bp, Homo sapiens
  misc_feature 1..327: note = U/M: U (0.03:0.75) in Gastric + Small Intes. + Colon Epithelium
  misc_feature 1..327: note = source = chr1:23028593-23028919; Gene: EPHB2 (Intergenic)
  source 1..327: mol_type = genomic DNA
cgtcttctttgcctggtcctctttaaatgtgaatcagctaaaacctttccagagagcttagctacacccacacccagttccatgacttttttcttctcacgtccagggtccttaaaaaatgggacctgtgccttacccttctgtatgtgtccccaaccccagtgcccagcctagtctggatcttttctgtgattgtacccggataggggacagctgtcctggccttcagagcctccacacccagctcactcgcccagctcccccaccctgctgcacctctgttaccaggaacccatcaaaacagcattatcaaactccaggagagac

SEQ ID NO: 6557 - DNA, 80 bp, Homo sapiens
  misc_feature 1..80: note = U/M: U (0.07:0.96) in Gastric + Small Intes. + Colon Epithelium
  misc_feature 1..80: note = source = chr4:38540553-38540632; Gene: KLF3 (Intergenic)
  source 1..80: mol_type = genomic DNA
cgtagatatttaaaatacataaaaagaggccgggcccggtggctcacgcctctaatcctagcactttgaaaggcagaggc

SEQ ID NO: 6558 - DNA, 495 bp, Homo sapiens
  misc_feature 1..495: note = U/M: U (0.02:0.93) in Gastric + Small Intes. + Colon Epithelium
  misc_feature 1..495: note = source = chr14:78141056-78141550; Gene: ALKBH1 (intron)
  source 1..495: mol_type = genomic DNA
cgactaatttttgtatcttagtagagatggggttttaccgtgttggccaggctggtctcaaactcctgaactcaagtgatccactggcctcggcctcccaaagtactgggattataggtgtaagccatcatgcccagcctattgatgtgtctttgagtctttcaataaaatcatttgagttctttactatgtttacctttcctcattttaaagataaggcaattaataaaaggcactttcccgagatgcaggtgcaaaacttggcacaaatttaaacttacttttagggagacaaggagagtaaactactcaggcttttgtgctttgctctatagtttgctcttctataccaaaggtcactcgctttgcttttatggctttccacttgtctattccacagagcactgacaatacctttcattataaaaggtaggttacggccaggtgcagtggctcatgcctgtaatctcagcacttcgggaggccgaagtgggc

SEQ ID NO: 6559 - DNA, 96 bp, Homo sapiens
  misc_feature 1..96: note = U/M: U (0.01:0.91) in Gastric + Small Intes. + Colon Epithelium
  misc_feature 1..96: note = source = chr13:30707879-30707974; Gene: KATNAL1 (Intergenic)
  source 1..96: mol_type = genomic DNA
cgcctccagtgccagcccaggaggtggtggccctgtcctgacgccccgtctagccaccgggccagagctgggagccccatagtggagtctgtgtcc

SEQ ID NO: 6560 - DNA, 364 bp, Homo sapiens
  misc_feature 1..364: note = U/M: U (0.02:0.91) in Gastric + Small Intes. + Colon Epithelium
  misc_feature 1..364: note = source = chr17:70409454-70409817; Gene: LINC00673 (intron)
  source 1..364: mol_type = genomic DNA
cgcaacccaaggtgcacgcacctgagggcccacgattctttgcacagggtgacgcctgctccctttgatgcttgccggatgtgttcccaatgggcaaaaaccagacctcaataaaacccggcattatcaagaggccggtggtttgtgattgcaccagcctgttatctccgaggccctgggtggggctgctttgcggttctccattgaaaagcattaacttataggtagatcaaagaccctcccgaaccagccgacctggtcccttgtttgtcccggtggactgtgccaaaagatggactttaaagataataggtaccccagtcccagactcccttctgccctccctctccttctcatgcactac

SEQ ID NO: 6561 - DNA, 314 bp, Homo sapiens
  misc_feature 1..314: note = U/M: U (0.05:0.94) in Gastric + Small Intes. + Colon Epithelium
  misc_feature 1..314: note = source = chr13:30707459-30707772; Gene: KATNAL1 (Intergenic)
  source 1..314: mol_type = genomic DNA
cggccacctaaggcaggccggcttatgcgtgactgtcaaccgaggcaggccacagcgctgtgggcaggcggttttgcacgtatccttagtgaccctgaaggcccagcctctgctggctgcctgagccgagggttttacttcttttcatttaatcactttattggtccttgccgggagggagcccatgggtcctggtaaaagtgcatctccctgtggttctggggctgatcctccttctggagcagaagacagagctcagtgaggaccgcctgtgctgcctgcctgggacgccccagccgcagggccgcgcaggc

SEQ ID NO: 6562 - DNA, 143 bp, Homo sapiens
  misc_feature 1..143: note = U/M: U (0.02:0.88) in Gastric + Small Intes. + Colon Epithelium
  misc_feature 1..143: note = source = chr3:71580226-71580368; Gene: FOXP1 (intron)
  source 1..143: mol_type = genomic DNA
cgttcaggtgtgaataaaacctttgttccttatttccactatctccacctctgaggagggacgcacataaataaatataatttcttccgggcccagggctcagtgcaatgctcaggcaaagtaggagatatcggttcaaatcc

SEQ ID NO: 6563 - DNA, 166 bp, Homo sapiens
  misc_feature 1..166: note = U/M: U (0.09:0.93) in Gastric + Small Intes. + Colon Epithelium
  misc_feature 1..166: note = source = chr12:124723891-124724056; Gene: ZNF664-FAM101A (intron)
  source 1..166: mol_type = genomic DNA
cgtcagcagatcccagcatctccagacccagatccatgagccatctagaagtgaaagaagtttcccaaccaacaactgtcctaccaaatgttgcgttggaaaatcaaagtgagatgactctcacaggacccgggaacaggggactccaggcatcccgggcctgtgc

SEQ ID NO: 6564 - DNA, 394 bp, Homo sapiens
  misc_feature 1..394: note = U/M: U (0.06:0.85) in Gastric + Small Intes. + Colon Epithelium
  misc_feature 1..394: note = source = chr17:15855461-15855854; Gene: ADORA2B (intron)
  source 1..394: mol_type = genomic DNA
cggtgaccacgtgcagggcaggacccaatccctgtatctcactcttctcatttgtcagtttattatcacagcatgggtgtacactgcagggacagatatggggaagtgtcctcagctattctggacatagagattttcagtcttgtgaatggcagccattgttcccaagccgtttctgggtgccaggcaccttacatccctaatctcctttgatctttgcgaccgccctatgggagcagatggagttatcttcaccacctcacagataagaagatggaggtgcagaaaattatgtttagcccagggtcacacggaagccgggactgaggcagcctatcttcccaggagcccttaaccatcatgtgagcagctggagggaaggactgcacacccc

SEQ ID NO: 6565 - DNA, 289 bp, Homo sapiens
  misc_feature 1..289: note = U/M: U (0.14:0.92) in Gastric + Small Intes. + Colon Epithelium
  misc_feature 1..289: note = source = chr1:1652504-1652792; Gene: CDK11A (intron)
  source 1..289: mol_type = genomic DNA
cggggtttcaccgtgttagccaggaggctgaggcaggagaatggtgtgaaccagggaggcggagcttgcagtgagccgagatggcgccactgcactccagcctgggtgagcaagactcttgagacaccgtctcaaaaaaaaaaagagtacacttcagtatttacaacagcacactgagcacactgtcacagtaaccctaggaaagagtaaaccttaatagttacaatagcacaccccgtcacgtaaccctagggaagagtaaacctcaatagttaaaacagcacacccc

SEQ ID NO: 6566 - DNA, 453 bp, Homo sapiens
  misc_feature 1..453: note = U/M: U (0.02:0.91) in Gastric + Small Intes. Epithelium
  misc_feature 1..453: note = source = chr2:174111136-174111588; Gene: ZAK (intron)
  source 1..453: mol_type = genomic DNA
cggcttccagaatctcaggcgacttcatgcgctccccagggtggcaaccacccctttttattaaaatattcggctgcctagattttattattatatctcttatcagctcaccacgcaggaatattgattctcaaattgccaagagataaactatcaaatcacccagcagttttctcaccaagatctttttgagacttcgtgtgtcataaaaattcaaaagcagaattaggaaggaactctttggggagtcgtccattccttacaaatgctcaaccgccacagactttgttccttgcatccttatttcctcctctccccaataaggcaaaggaaacctgattgaagctgggttcccatgggtctaaactgataacctgacatagataagagactgaggttaggggaaaagtaacggaaacagcacgctgcccctcccaactctccgaacacgcc

SEQ ID NO: 6567 - DNA, 232 bp, Homo sapiens
  misc_feature 1..232: note = U/M: U (0.08:0.96) in Gastric + Small Intes. Epithelium
  misc_feature 1..232: note = source = chr8:126371226-126371457; Gene: NSMCE2 (intron)
  source 1..232: mol_type = genomic DNA
cggccaggcgcggtggctcacacctgtaattccagcactttgggaggccgaggcgggtggatcacgaggtcaggagatagagaccatcctggctaacacggtgaaaccccgactctactaaaaataaaaaaaaattagccgggcgtggtggcaggcgcctacagtcccagctactggggtggctgaggcaggagaatggcatgaacccgggaggcggagcttgcagtgagcc

SEQ ID NO: 6568 - DNA, 490 bp, Homo sapiens
  misc_feature 1..490: note = U/M: U (0.06:0.93) in Gastric + Small Intes. Epithelium
  misc_feature 1..490: note = source = chr12:117400776-117401265; Gene: FBXW8 (intron)
  source 1..490: mol_type = genomic DNA
cgtgctttggctggggtgatctcaggatctgcccttgcttgcacgtcgctgggcttaaggacattcatcttgtgtttctgtttactggaggatcagtggtcaacccagaggtacagcaggccaggttcagaaagcacgtctctcccgtttggctctttatcccacatgcgcactctctgggtgccaccctgcaggtagagagccaagttctccaaccaaggaattggggtgacagaatggcctttggactgtgcaatatatgtatttactgtagattaagaatttgggtgcagtactactagtaaacaaagcactcctgaatcagagtacttctctataagaaattccacctgaggccagctgtggtggctcacacctgtaatcccaacacttttggaggccgacgtgggtggatcacttgaggccaggagttcaagaccagctgggggaaaaccccatctctactaaaaactaaaaaaacaaactagcc

SEQ ID NO: 6569 - DNA, 141 bp, Homo sapiens
  misc_feature 1..141: note = U/M: U (0.04:0.89) in Gastric + Small Intes. Epithelium
  misc_feature 1..141: note = source = chr15:59860677-59860817; Gene: GCNT3 (Intergenic)
  source 1..141: mol_type = genomic DNA
cggtgaaaccccatctgtgctaaaaatacaaaaaattagctgggcatggtggcatgcgcctgtggtcgcggctactcaggtggctgaggcaagagaatcgcttgaacccgggaggctgaggttacagtgagccgagattgc

SEQ ID NO: 6570 - DNA, 459 bp, Homo sapiens
  misc_feature 1..459: note = U/M: U (0.05:0.88) in Gastric + Small Intes. Epithelium
  misc_feature 1..459: note = source = chr12:98968977-98969435; Gene: SLC25A3 (Intergenic)
  source 1..459: mol_type = genomic DNA
cgccagtctgcagcactgcactccagcccaggtaagcccgtgtcaaaaaaaaaaaaaaaaaaaagccagcgaaacacctaactagtaatgtgttataatctagattccagagtccatatctatactgataacacatgaatgaatgaataaaaaggaaagctcattctttttgttttgttttgttttgagacagagtcttgctctgtcacccaggctggagtgcagtggtgtgatcttggcttgctgcaacctctacctcccaagttaaagtgatcctccccacctcagcctcctgagtagctgggactacaggtgtgtgccaccatgcctggataatttttgtatatttactagagatagggttttgccattttggccaggctggtctcgaactcctggccttaagttatctgcctgccttggcctcccaaagtgctggaattataggcgtgagctacc

SEQ ID NO: 6571 - DNA, 45 bp, Homo sapiens
  misc_feature 1..45: note = U/M: U (0.05:0.87) in Gastric + Small Intes. Epithelium
  misc_feature 1..45: note = source = chr16:31034362-31034406; Gene: STX4 (Intergenic)
  source 1..45: mol_type = genomic DNA
cgcggtggctcatgcctgtaatcccgcactttgggaggtcgaggc

SEQ ID NO: 6572 - DNA, 192 bp, Homo sapiens
  misc_feature 1..192: note = U/M: U (0.08:0.89) in Gastric + Small Intes. Epithelium
  misc_feature 1..192: note = source = chr11:67091057-67091248; Gene: LOC100130987 (intron)
  source 1..192: mol_type = genomic DNA
cgctgactttccacatttaatcaattatcagattctgatagtccttcacaaaacagttgccttttgtccccacttcctttacccagccgaagtccctgttcctacgcctcagctactgtgataactttacagctggtgatgccctttagtctgtccagagcaccttaactacacagacgtattcatcccttc

SEQ ID NO: 6573 - DNA, 56 bp, Homo sapiens
  misc_feature 1..56: note = U/M: U (0.1:0.89) in Gastric + Small Intes. Epithelium
  misc_feature 1..56: note = source = chr7:103033055-103033110; Gene: SLC26A5 (intron)
  source 1..56: mol_type = genomic DNA
cgctctgtcgcccaggctggagtgcagcggcgcgacctcggctcactgcaagctcc

SEQ ID NO: 6574 - DNA, 114 bp, Homo sapiens
  misc_feature 1..114: note = U/M: U (0.01:0.8) in Gastric + Small Intes. Epithelium
  misc_feature 1..114: note = source = chr6:132596447-132596560; Gene: MOXD1 (Intergenic)
  source 1..114: mol_type = genomic DNA
cgcagtgaaggagccggatcctctgagaccagttcagaggcaccccctctcccacacagcctggtgcagctggggccggcaggcaggaagtttgccccacgggatagcagttgc

SEQ ID NO: 6575 - DNA, 203 bp, Homo sapiens
  misc_feature 1..203: note = U/M: U (0.06:0.84) in Gastric + Small Intes. Epithelium
  misc_feature 1..203: note = source = chr12:120131739-120131941; Gene: CIT (intron)
  source 1..203: mol_type = genomic DNA
cgggcacatggtatggagtccacataactatttagaaggtagacacaccttataataatccagaagattatcttaggtcatttattcccggggttaaataatctcagaccttctttgcaggccaaggtttcaaacttcctacacctcgagctggatctagctcctagcactgtgtcaagacgaggccagtcccacttccacac

SEQ ID NO: 6576 - DNA, 131 bp, Homo sapiens
  misc_feature 1..131: note = U/M: U (0.05:0.82) in Gastric + Small Intes. Epithelium
  misc_feature 1..131: note = source = chr7:106659628-106659758; Gene: PRKAR2B (Intergenic)
  source 1..131: mol_type = genomic DNA
cggggtttcaccatgttggtcaggctggtcttgaactcctgacctcatgatccgcccgcctcgggctcccaaagttgactttcttatctggaaaatggagataatctagtttccagctcatggggttttgc

SEQ ID NO: 6577 - DNA, 179 bp, Homo sapiens
  misc_feature 1..179: note = U/M: U (0.13:0.89) in Gastric + Small Intes. Epithelium
  misc_feature 1..179: note = source = chr10:123809806-123809984; Gene: TACC2 (exon,intron)
  source 1..179: mol_type = genomic DNA
cgcacatagtaggtgtttcgttggacggcagagcaagtgaacaaccttaccttgaatgctgtggtgggtgccctgttgataaatgtttttgtgttttcagagactcctatctgatttcctttccaatttctttttctcctggctcagaggactttatcagctcagactccaaggtccgc

SEQ ID NO: 6578 - DNA, 151 bp, Homo sapiens
  misc_feature 1..151: note = U/M: U (0.13:0.88) in Gastric + Small Intes. Epithelium
  misc_feature 1..151: note = source = chr6:126312588-126312738; Gene: TRMT11 (intron)
  source 1..151: mol_type = genomic DNA
cgggtgttaatcagaggctgagtgttggtgtgagggggcgggagggggtcttgggagctctcactgtgttgccagggttggtctcagactcccggtctcaagttatctctttgcctcggcctcccaaagtgctgggattgcaggtggagcc

SEQ ID NO: 6579 - DNA, 255 bp, Homo sapiens
  misc_feature 1..255: note = U/M: U (0.07:0.8) in Gastric + Small Intes. Epithelium
  misc_feature 1..255: note = source = chr5:1165489-1165743; Gene: SLC6A19 (Intergenic)
  source 1..255: mol_type = genomic DNA
cgcactttgaacagccatgcagaagcctccacccaggcagcccctcctcccaggctggccgcaccatccttctgatgaagaaaaaccaggttcagccctctcttatcgggacacaaaataagggccctggcgcaccagagcagggtcatccccctagggtgcaaggaggtgttttggcctctaaggacacaaagagctgagtggaaagaccagccccttctaagggggcgcgtagaggtggatgtaaagggcccc

SEQ ID NO: 6580 - DNA, 247 bp, Homo sapiens
  misc_feature 1..247: note = U/M: U (0.19:0.91) in Gastric + Small Intes. Epithelium
  misc_feature 1..247: note = source = chr16:29263424-29263670; Gene: SNX29P2 (Intergenic)
  source 1..247: mol_type = genomic DNA
cgtacatatgtaagtgtgcacgtgtgtgtctgtgtgtaagcatgtacacgtgtctctgtgtgtgcacacacatgtgccctgggcccacagcctttttactgcttatctgtgaagcgcccagtgggtccccagcggctcagggtgttgaggggctcaggatctgctgtgctctggggagtggaggtgccccagcctcactgctgggctcacgtggctcagccccatggtgggatggtggggccccaac

SEQ ID NO: 6581 - DNA, 382 bp, Homo sapiens
  misc_feature 1..382: note = U/M: U (0.21:0.91) in Gastric + Small Intes. Epithelium
  misc_feature 1..382: note = source = chr8:41673482-41673863; Gene: ANK1 (intron)
  source 1..382: mol_type = genomic DNA
cgatgaagatatcgaagggtatacttaccaaagagattgggaaacctttttaaacagacatattataaaacattattactgtttaaaagtccatttataaacctttatcgctcttacatctgtgtaattcacttgttcttaacaattatgtttggattattcataaaaattaaataagacattagataaagctagccatcatttcacgctatttccattaactattttcatagcacctgcatgttatgagagtcacaaaagcaagaacataaaaagttaaataattggacttttgtcttactgatgtgattgatatacacacagtaatggacactgcagttttacttgcacagttgctcttaggttgaacccatagtcttac

SEQ ID NO: 6582 - DNA, 55 bp, Homo sapiens
  misc_feature 1..55: note = U/M: U (0.25:0.93) in Gastric + Small Intes. Epithelium
  misc_feature 1..55: note = source = chr12:76342313-76342367; Gene: PHLDA1 (Intergenic)
  source 1..55: mol_type = genomic DNA
cgcggtggatcacaactgtaatcccagcactttgggaggccgaggcagggcgatc

SEQ ID NO: 6583 - DNA, 486 bp, Homo sapiens
  misc_feature 1..486: note = U/M: U (0.21:0.88) in Gastric + Small Intes. Epithelium
  misc_feature 1..486: note = source = chr5:55076926-55077411; Gene: DDX4 (intron)
  source 1..486: mol_type = genomic DNA
cgcactggtggcctttttggttctagaagaccagtattaagtggcacaggtgagaaatagaacttattactgaatattagttactgatgtatgtttttagcactaggattagtaaacctaatatatatgttaaagtatactagtttggcttatgattttctctgcttttagatctgtaggtaaaaatatgtggacaattttgtctcccttataaaatttgtgcaatgtgaattatttattctgtgttatctaccagttaatttgaggtgtgaattattaactagaggaataaaggattctgagttaggggaaaaggatttgtgtgagttgaagtgaaaatgaaaacacaattgatgaaaaatgttcaaatgaggttaaggttaaagttaaacctagaggccgggcgtggtggctcatgcctgtaatcccagcagtttgggaggctgaggcaggtggatcacttgaggccaggagttcgacaccagc

SEQ ID NO: 6584 - DNA, 253 bp, Homo sapiens
  misc_feature 1..253: note = U/M: U (0.18:0.82) in Gastric + Small Intes. Epithelium
  misc_feature 1..253: note = source = chr3:175546376-175546628; Gene: MIR4789 (Intergenic)
  source 1..253: mol_type = genomic DNA
cgacctcttatctctgtgccccaatcccttatttctgcaccccgacctcttatctctgtgccccaatcccttatttctgcaccccgacctcttatctctgtgccccaatcacttatttctgcaccccgacctcttatctctgtgccccaatcccttatttctgcaccccgacctcttatctctgtgccccaatcccttatttccacaccccaacttcttatctctgtgccccaatcccttatttccatgctcc

SEQ ID NO: 6585 - DNA, 47 bp, Homo sapiens
  misc_feature 1..47: note = U/M: U (0.27:0.9) in Gastric + Small Intes. Epithelium
  misc_feature 1..47: note = source = chr6:141181297-141181343; Gene: MIR4465 (Intergenic)
  source 1..47: mol_type = genomic DNA
cggagtctcgctctgtcgcccaggctggagtgcagtggcgcgatctc

SEQ ID NO: 6586 - DNA, 97 bp, Homo sapiens
  misc_feature 1..97: note = U/M: U (0.31:0.94) in Gastric + Small Intes. Epithelium
  misc_feature 1..97: note = source = chr1:28803742-28803838; Gene: PHACTR4 (intron)
  source 1..97: mol_type = genomic DNA
cgtctgccactaggcccagctaatttttttttatttttagtagaggcggcgcttcactgtgttggccaggctggtctcgaactcgacctcgtgatcc

SEQ ID NO: 6587 - DNA, 45 bp, Homo sapiens
  misc_feature 1..45: note = U/M: U (0.25:0.87) in Gastric + Small Intes. Epithelium
  misc_feature 1..45: note = source = chr17:7178011-7178055; Gene: SLC2A4 (Intergenic)
  source 1..45: mol_type = genomic DNA
cgggcgcggtagctcacggctgtaatcccagcactttgggaggcc

SEQ ID NO: 6588 - DNA, 265 bp, Homo sapiens
  misc_feature 1..265: note = U/M: U (0.32:0.9) in Gastric + Small Intes. Epithelium
  misc_feature 1..265: note = source = chr18:54641748-54642012; Gene: WDR7 (intron)
  source 1..265: mol_type = genomic DNA
cgttattcagctttggttaactctaggtcatagagcttaactagttagagcaatagtgagtggaattatcagagagtagcctcccgaccacgggcattgctcatgtgctaggcaccagttaggatatgtgacagagggaataggagtcttggttaaccccacgagtcagtaaagtgaaagtcaattaagagagattgtgttatcataccttcagcatatgatatctagaagtattgacatggcactatgaaatgcaaaagggaac

SEQ ID NO: 6589 - DNA, 289 bp, Homo sapiens
  misc_feature 1..289: note = U/M: U (0.33:0.9) in Gastric + Small Intes. Epithelium
  misc_feature 1..289: note = source = chr2:159719993-159720281; Gene: DAPL1 (Intergenic)
  source 1..289: mol_type = genomic DNA
cgatgaaaaatatcacagggtgtgcacactgtgtgatatgaggagtaatatttaccctggatattacgactcatatcaagggtgtacacacccggggtacacgcactgtgatatcaggagttgtatctccctaggatattatgaatactatcacagggtatacactatgtgtgtacatccactgtgatatttgaagtaatatctctctatgagattataaataacatcaaagcttgtacacccctgtgacatgttaggagtaacatccttccagggtattgcagatcac

SEQ ID NO: 6590 - DNA, 369 bp, Homo sapiens
  misc_feature 1..369: note = U/M: U (0.04:0.88) in Gastric + Small Intes. Epithelium
  misc_feature 1..369: note = source = chr13:24720631-24720999; Gene: SPATA13 (Intergenic)
  source 1..369: mol_type = genomic DNA
cgatacataactaagtactctataatcttatctacatagataagaaataatacataaacctgtatgataattaacacagaggaaagtaggctataaataacctctaaaatgttcttttacagggcactaaggaaatggaaatgcacagcaatttaaaaaaaatgccaatacttctcttacttgtcacaggttagagatatgtgaatgccatgattatgttatacatttaattagtatatacctttgtgtctaaagcattttccatcgtggtcggctatgcttcctgcagtctcaaatgccctctacacactacggaatatcctatctcccagatggactgagatttctttaccaccgcatccgtccccg

SEQ ID NO: 6591 - DNA, 110 bp, Homo sapiens
  misc_feature 1..110: note = U/M: U (0.02:0.84) in Gastric + Small Intes. Epithelium
  misc_feature 1..110: note = source = chr12:52740967-52741076; Gene: KRT85 (Intergenic)
  source 1..110: mol_type = genomic DNA
cgctgaggagagccgaggctcaggggcacagcgagggggacaaaggtcactccacatcctcttgtgtctatctccaccaggatgtaggctacacctatctgcacgagacg

SEQ ID NO: 6592 - DNA, 279 bp, Homo sapiens
  misc_feature 1..279: note = U/M: U (0.03:0.85) in Gastric + Small Intes. Epithelium
  misc_feature 1..279: note = source = chr7:100877035-100877313; Gene: CLDN15 (intron)
  source 1..279: mol_type = genomic DNA
cgcctggctaattttttttttttttttttttttttttttttggtatttttagtagagacagggtttcaccatgttggccaggctggttttgaactcctgacctcaagtaatccacccacctcagcctaccaaagtgctgggattacaggcatgagccaccatgccccgtggtatggcactgtggacgtgcactgtgtgtgtgcgccatagcgtgcaccctaactctgctccccagctaggatgtaagctcccggaggcagccgctcactcttatcttcg

SEQ ID NO: 6593 - DNA, 159 bp, Homo sapiens
  misc_feature 1..159: note = U/M: U (0.08:0.89) in Gastric + Small Intes. Epithelium
  misc_feature 1..159: note = source = chr5:148983296-148983454; Gene: ARHGEF37 (intron)
  source 1..159: mol_type = genomic DNA
cgagatcacccaggccaacatggtgaaaccccgtctctactaaaaatacaaaaattagccagatgtggtggcacacacttgtaatcccagctatgcaggagtctgaggcacgagaatcgcttgaacccgggaggcggaggttgcagggagctgagatcg

SEQ ID NO: 6594 - DNA, 134 bp, Homo sapiens
  misc_feature 1..134: note = U/M: U (0.09:0.89) in Gastric + Small Intes. Epithelium
  misc_feature 1..134: note = source = chr11:129283909-129284042; Gene: BARX2 (intron)
  source 1..134: mol_type = genomic DNA
cgagatcgcgccactgcactccagcctgggaggcagacggagactccatctcaaaaaaaaaaaagagagagcggacagtaatagctcggggattatttaggtttgatatcagtttgaacttccttacattaccg

SEQ ID NO: 6595 - DNA, 144 bp, Homo sapiens
  misc_feature 1..144: note = U/M: U (0.09:0.89) in Gastric + Small Intes. Epithelium
  misc_feature 1..144: note = source = chr7:139517008-139517151; Gene: TBXAS1 (intron)
  source 1..144: mol_type = genomic DNA
cgtcccagccccccatcagctgtctttctcgacagcacttggcgcccatcccttcctcttccaccctgcttcccatgtgagcttgacacatgcacgctgcccacctgtacatgcatgcacacgtgcctgctccacaagacgccg

SEQ ID NO: 6596 - DNA, 163 bp, Homo sapiens
  misc_feature 1..163: note = U/M: U (0.08:0.88) in Gastric + Small Intes. Epithelium
  misc_feature 1..163: note = source = chr1:230397581-230397743; Gene: GALNT2 (intron)
  source 1..163: mol_type = genomic DNA
cgtctctactaaaattacacaaaaattttagctgggtgtggtggtacatgcctatagtcccagctgctcaggaagctcaggcaggagaatcgcttgaacccgggaggcggaggtttcagtgagccgagatctcgccactgcactccagcttggcagcagagcg

SEQ ID NO: 6597 - DNA, 353 bp, Homo sapiens
  misc_feature 1..353: note = U/M: U (0.06:0.86) in Gastric + Small Intes. Epithelium
  misc_feature 1..353: note = source = chr6:147879240-147879592; Gene: SAMD5 (intron)
  source 1..353: mol_type = genomic DNA
cgtcatggcaattatattggtgataattgaagtatgagttagcagattaatgttaatggtgatttcaaagacaattagtatacaataatagatgattttcctgtggaataggttgatgagagacagagacagaaggagggagagaatgagaacttcaagtgagcagcccaggagcctgatgagagccaggcaacagaagtgttgtatccaaagacccaccatattttaacgaactgcagtagaggccagacactggcgttcagcacactccagcatttatggctatttctgttctgggcttgtgctgcgtaattataaggcctgtgtcttgatcacattttggatggtattcg

SEQ ID NO: 6598 - DNA, 333 bp, Homo sapiens
  misc_feature 1..333: note = U/M: U (0.02:0.81) in Gastric + Small Intes. Epithelium
  misc_feature 1..333: note = source = chr4:31125721-31126053; Gene: PCDH7 (intron)
  source 1..333: mol_type = genomic DNA
cgagcaggagaaaaggaatacaggttctcattagggccgtgagtccagcctcgagggtggagccctcaccagggaccttgcactcttctacgcagtatttgcctgcctcctgtctatatcagtagtgataacagcagagaatatattaggtgcttctatgtgtataccataatgctaagcactcaatgtgcattttctcatttacttctcagaacaacccaatgagatagactcagatttaaatcacttgctaaagaacatagttgataagtggcagaatgtggactcaaagcagacttcctttgttcagatacctgagtgttaaccaccccg

SEQ ID NO: 6599 - DNA, 382 bp, Homo sapiens
  misc_feature 1..382: note = U/M: U (0.07:0.86) in Gastric + Small Intes. Epithelium
  misc_feature 1..382: note = source = chr3:141660918-141661299; Gene: ATP1B3 (Intergenic)
  source 1..382: mol_type = genomic DNA
cgagtgcttacttagccatctccttttcaagacctgggtctacttgctggcccctgaactgctccacacccttctgtgccttctgattgtccacgtgctcaacttgttggaacataggagataagctatctagggttccggcctctccctgagacaggtagagactgcgtgatcaggtgctgaggggctgctatgttccggaggtcaggtgacattccacctgaggcctggggacatggcattctatattgactgctgtcgctgttctcgctgatgctggtttggtgtaagagatgataagaaagcatcttccctacgaattgcagggaagcaattctgggcctagcctcccaaagtgctaagattacaggggtaagccacg

SEQ ID NO: 6600 - DNA, 171 bp, Homo sapiens
  misc_feature 1..171: note = U/M: U (0.09:0.87) in Gastric + Small Intes. Epithelium
  misc_feature 1..171: note = source = chr4:142599879-142600049; Gene: IL15 (intron)
  source 1..171: mol_type = genomic DNA
cgagtagctgggactacaggcacgtgccaccacacccggctaatttttgtatttttagtagagacagggtttctccgtgttggccaggatggccttgatctcttgaccttgtgatccgcctgcccaggcctcccaaagtgttgggattacaggtgtgagccaccacgcccg

SEQ ID NO: 6601 - DNA, 251 bp, Homo sapiens
  misc_feature 1..251: note = U/M: U (0.14:0.92) in Gastric + Small Intes. Epithelium
  misc_feature 1..251: note = source = chr17:76988813-76989063; Gene: CANT1 (exon)
  source 1..251: mol_type = genomic DNA
cgccaccgcttccttacaatctcccgcactgctggagcgggctgggtaactacaggactgtgctctgtgtgataagatttggtgattccactttataagaaaggaaactgctttaattaaagcaggttaataattaaaacttcaaagtactgcacagccacagaattttcttgaagggagaaagcggtcactggccatatgatgcggagatggttttatctgaggcctgagaaccaacagatgtgcctgcg

SEQ ID NO: 6602 - DNA, 159 bp, Homo sapiens
  misc_feature 1..159: note = U/M: U (0.12:0.87) in Gastric + Small Intes. Epithelium
  misc_feature 1..159: note = source = chr7:66418219-66418377; Gene: TMEM248 (exon)
  source 1..159: mol_type = genomic DNA
cgttcattaataaatttgcatctcatgcacaccagttacttcctctttgtgatggtgataacaatgttttgctatgctgttatcaagggcagacctagcaaattgcgtcagagcaatcctgaattttgtcccgagaaggtgagcggtggatggggtccg

SEQ ID NO: 6603 - DNA, 215 bp, Homo sapiens
  misc_feature 1..215: note = U/M: U (0.09:0.84) in Gastric + Small Intes. Epithelium
  misc_feature 1..215: note = source = chr10:108257664-108257878; Gene: SORCS1 (Intergenic)
  source 1..215: mol_type = genomic DNA
cggagaacctaactgactttcccaaagcaatgagttaattattatctgtcagtacttatgcgataatgaacataacgatagcaataaacatagctagtacttactgaaaatttactgtgtgataaccactctttcaagcattctgtatgttaatatacgtagtcctttctgaaacaaactatgaagtagctactcttattatccacatttttccg

SEQ ID NO: 6604 - DNA, 225 bp, Homo sapiens
  misc_feature 1..225: note = U/M: U (0.16:0.91) in Gastric + Small Intes. Epithelium
  misc_feature 1..225: note = source = chr6:138300458-138300682; Gene: LOC100130476 (Intergenic)
  source 1..225: mol_type = genomic DNA
cgggtttcaccatcttggccaggctggtcttgaactcctgacctcgtgatccacgcacttcggcctcctaaagtgttgagattacaggcgtgagccaccacacccagcccagtatcaacctttctaccacaccaccttccaagaaaaatcaaagctttggtcaacaccactctgcctctccactttagataaactcccttgcatccaccctcaatgtctacaccg

SEQ ID NO: 6605 - DNA, 407 bp, Homo sapiens
  misc_feature 1..407: note = U/M: U (0.1:0.85) in Gastric + Small Intes. Epithelium
  misc_feature 1..407: note = source = chr4:68625812-68626218; Gene: GNRHR (Intergenic)
  source 1..407: mol_type = genomic DNA
cgttgaagcctagagatgctgtagttatttaataaaatctttgaaaaatagttttattcaggtaaatcactcacttcctttatagttacttttatctgaaatttttccactaattgatttgctaggttgtataatttggaaatttattagcattatttttcaaaggtagaaatgataacaggaacgggaagaataaaaacccctttcttctgcttatttctctttatctatgatgcagatatcacatacacaaggcctttgttttaaggtgtaatttcgtagataggggtgtatatctatgatatagtattacttgcatagaattttttctttacaaacatccataaaaacaaagaaaaatcttttaaagcaagagtcttcgaatagttaaacttgattaactggcg

SEQ ID NO: 6606 - DNA, 102 bp, Homo sapiens
  misc_feature 1..102: note = U/M: U (0.17:0.91) in Gastric + Small Intes. Epithelium
  misc_feature 1..102: note = source = chr17:73379651-73379752; Gene: GRB2 (intron)
  source 1..102: mol_type = genomic DNA
cgggtggctcacgcctgtaatcccagcattttgggaggctgaggcaggcggatcacaaggtcaggagttcgagaccagcccggccaatatggtgaaagcccg

SEQ ID NO: 6607 - DNA, 58 bp, Homo sapiens
  misc_feature 1..58: note = U/M: U (0.15:0.88) in Gastric + Small Intes. Epithelium
  misc_feature 1..58: note = source = chr15:51133407-51133464; Gene: AP4E1 (Intergenic)
  source 1..58: mol_type = genomic DNA
cgggttttcaccgtgttagccaggttggtctcgatctcctgacctcgtgatccgcccg

SEQ ID NO: 6608 - DNA, 72 bp, Homo sapiens
  misc_feature 1..72: note = U/M: U (0.16:0.89) in Gastric + Small Intes. Epithelium
  misc_feature 1..72: note = source = chr7:123677859-123677930; Gene: TMEM229A (Intergenic)
  source 1..72: mol_type = genomic DNA
cggagtcttgctctgtcgcccaggctggtgtgcagtggcgcgatctcggctcattgcaagctctgcctcccg

SEQ ID NO: 6609 - DNA, 180 bp, Homo sapiens
  misc_feature 1..180: note = U/M: U (0.19:0.92) in Gastric + Small Intes. Epithelium
  misc_feature 1..180: note = source = chr2:74690813-74690992; Gene: MOGS (intron)
  source 1..180: mol_type = genomic DNA
cggagtctcgctctgtcgcccaggctggagtgcagtggcgcgatctcagctcactgcaagctccgcctcccaggttcacgccattctcctgcctcagcctcccgagtagctgcgacaataggcgcccgccaccacgcccagctaattttttgtatttttagtagagaccgggtttcaccg

SEQ ID NO: 6610 - DNA, 75 bp, Homo sapiens
  misc_feature 1..75: note = U/M: U (0.08:0.79) in Gastric + Small Intes. Epithelium
  misc_feature 1..75: note = source = chr12:125095292-125095366; Gene: NCOR2 (Intergenic)
  source 1..75: mol_type = genomic DNA
cgcccaagctgcccctgcctcgccgtgacctttggagggatgcacgcacggccataagcatcacgtggggccacg

SEQ ID NO: 6611 - DNA, 188 bp, Homo sapiens
  misc_feature 1..188: note = U/M: U (0.14:0.85) in Gastric + Small Intes. Epithelium
  misc_feature 1..188: note = source = chr8:22218191-22218378; Gene: SLC39A14 (Intergenic)
  source 1..188: mol_type = genomic DNA
cgaagtgcaggattgctacagctgagtctcctgcatgaagagagctggaagctggaaggggactagagaacccctgccaatcatgctggggcggccgcagggaaatgtggtgtttgaccagggaaatggatagggcgaaaaagacatccatgaaaaatccccaagcctgggccacatacagatagacg

SEQ ID NO: 6612 - DNA, 212 bp, Homo sapiens
  misc_feature 1..212: note = U/M: U (0.15:0.85) in Gastric + Small Intes. Epithelium
  misc_feature 1..212: note = source = chr8:142199816-142200027; Gene: DENND3 (intron)
  source 1..212: mol_type = genomic DNA
cgggggcgcctgtgtcaggccctgttggggtgggtagggaggtgctagtctggaagcaaagctggctcaggaggttcaggggtggcgcagggtgcaggctcgagcccagccccgcccacagccgcctgcacctgcagccagcccatgtcacccgagagctctgaggatcgtgctggctccctggtcccttgtgtgaacggggaccgctgacg

SEQ ID NO: 6613 - DNA, 218 bp, Homo sapiens
  misc_feature 1..218: note = U/M: U (0.16:0.86) in Gastric + Small Intes. Epithelium
  misc_feature 1..218: note = source = chr21:40981788-40982005; Gene: C21orf88 (intron)
  source 1..218: mol_type = genomic DNA
cgtgagaggcttggtccaggcagagggcagggaaggagcaggtcctgaaatgacgtgggcctggcctgtggaaggagcacctgaaggctggcatggagggagggactggccgcagggaaatttgaccagcggctccttcgtgtggcgcaggactggcagcaggggactttgaccggcagctccatcatggggcacaatcttctaatctctgataagcg

SEQ ID NO: 6614 - DNA, 122 bp, Homo sapiens
  misc_feature 1..122: note = U/M: U (0.12:0.81) in Gastric + Small Intes. Epithelium
  misc_feature 1..122: note = source = chr5:139522630-139522751; Gene: IGIP (Intergenic)
  source 1..122: mol_type = genomic DNA
cgaagccagccaaggagtcaggctgatgggcctctgagctattgtgaggagtgaatgaggtcatgcatctgacatgcgtgaacacagtggtcatgtttaccaccgtgtctgacacgtagccg

SEQ ID NO: 6615 - DNA, 225 bp, Homo sapiens
  misc_feature 1..225: note = U/M: U (0.22:0.91) in Gastric + Small Intes. Epithelium
  misc_feature 1..225: note = source = chr17:62118078-62118302; Gene: ICAM2 (Intergenic)
  source 1..225: mol_type = genomic DNA
cggcgggagtgagaacacctgcgcacccaggatttcacacttagccactagattgcttcacagctaatcagggaaatgccagtgttccccaggtgaaaatgttttggtgcctaatgacttgtggagcacttcaaaaactgagattaggccgggtgcggtggctcaagcctgtaatcccagcactttgggaggctgaggcaggcggatcacgaggttaggagatcg

SEQ ID NO: 6616 - DNA, 386 bp, Homo sapiens
  misc_feature 1..386: note = U/M: U (0.26:0.95) in Gastric + Small Intes. Epithelium
  misc_feature 1..386: note = source = chr1:244865982-244866367; Gene: DESI2 (intron)
  source 1..386: mol_type = genomic DNA
cggctgtgtttcagtaaaactatctacaaaaccaagtggctatagataggactctgttgtaggctaatcaagccacaccctcaggggttggaatgaagtcagcttcacctgtagcacatggatatatggaggagggtagattactgaatgaaattaggacttgggaaggagaatgagggaaatggctgttgaataggcaacagtcgctatcacattaactaaatagtcttagtcatgacttacatgattaacctctaaataggcagatagccctaatatgtcccaggtgtaaagtacaatgtaatatttgtttgccagcgcttttttttttttttttggtgagacgaagtcttgctctgtcacccaggctggagtgcagtggcacg

SEQ ID NO: 6617 - DNA, 138 bp, Homo sapiens
  misc_feature 1..138: note = U/M: U (0.15:0.83) in Gastric + Small Intes. Epithelium
  misc_feature 1..138: note = source = chr2:64480705-64480842; Gene: LINC00309 (Intergenic)
  source 1..138: mol_type = genomic DNA
cgcttatttccgcaccccaacctcttatctctgcaccccaatcgcttatttccacgccccaacctcttatctctgtgccccaatcccttatttccgcaccctgacctcttatctctgtgccccaatcccttatttccg

SEQ ID NO: 6618 - DNA, 183 bp, Homo sapiens
  misc_feature 1..183: note = U/M: U (0.2:0.88) in Gastric + Small Intes. Epithelium
  misc_feature 1..183: note = source = chr11:129747565-129747747; Gene: NFRKB (intron)
  source 1..183: mol_type = genomic DNA
cgttctaaaggcaacaaacaattcggccttagaggaacaaagggcttcaggtgtgttagataagggttgtttttctacctccagggaaagtacccggggcttgagatctacacctctattacatgaagcaaaagttctgccacacttagaccgggcctctgtcctggtgtcagaaaactaccg

SEQ ID NO: 6619 - DNA, 46 bp, Homo sapiens
  misc_feature 1..46: note = U/M: U (0.24:0.91) in Gastric + Small Intes. Epithelium
  misc_feature 1..46: note = source = chr9:132445736-132445781; Gene: PRRX2 (intron)
  source 1..46: mol_type = genomic DNA
cgggcgcggtggctcacgcctgtaatcccagcactttgggaggccg

SEQ ID NO: 6620 - DNA, 179 bp, Homo sapiens
  misc_feature 1..179: note = U/M: U (0.26:0.92) in Gastric + Small Intes. Epithelium
  misc_feature 1..179: note = source = chr11:110303295-110303473; Gene: FDX1 (intron)
  source 1..179: mol_type = genomic DNA
cgattctcgtgcctcagccacccgaatatctgggattacaggcgcgtgccaccacactcggctaagttttgtagttttagtagagatgagatttcactatgttgaccagcctggtctggaacccctggcctcaagtaatctgcctgcttcagcctcccaaagtattgggattacaggcg

SEQ ID NO: 6621 - DNA, 293 bp, Homo sapiens
  misc_feature 1..293: note = U/M: U (0.18:0.84) in Gastric + Small Intes. Epithelium
  misc_feature 1..293: note = source = chr21:42874221-42874513; Gene: TMPRSS2 (intron)
  source 1..293: mol_type = genomic DNA
cgcgaatgaagttaggcttgtagacactgactcccacccaagatccaggggtattctctgcaatgaagtctccactgacctcaccgtgcaccattgtgcacacaccttctccttctcgaagcccccacctgtgactggtacggttcgagttgctggaggtgtgagagggaacagacagcctcagactcagtgccccttcttcaaaatccagacagcaccaccaccaccatccacggacacatcccagccaatgaccaaatcatcaaaaagagccctttatgccaaaataaccg

SEQ ID NO: 6622 - DNA, 196 bp, Homo sapiens
  misc_feature 1..196: note = U/M: U (0.27:0.92) in Gastric + Small Intes. Epithelium
  misc_feature 1..196: note = source = chr3:177003438-177003633; Gene: TBL1XR1 (Intergenic)
  source 1..196: mol_type = genomic DNA
cgacctcaggtgatccacctgtcttggcctcccaaattgctgggattacaggtgtgagtcaccgtgcccagcctagattatgtatttcttatgactaaacgccattataaattagcgatcttataataagtctcataatcattctaagactaaggttatcctgaacaaactatggttatctccacccccaataccg

SEQ ID NO: 6623 - DNA, 246 bp, Homo sapiens
  misc_feature 1..246: note = U/M: U (0.19:0.84) in Gastric + Small Intes. Epithelium
  misc_feature 1..246: note = source = chr12:125095370-125095615; Gene: NCOR2 (Intergenic)
  source 1..246: mol_type = genomic DNA
cggactggcgccagcctcctgagtgaatcccggcactgccacttcccgggtgtgtggccccaggtaagtcagataacctctgtggtctcagtttctctttgcataaaatgggattaataacagagcttgcctctccatggttcatgttggggcccctgctctccaggcctgtggggtgcatctggctgtgtctatgtgagtgcaaatctgctagtgtctgggaaggtgcatgtgagtttgggcacg

SEQ ID NO: 6624 - DNA, 62 bp, Homo sapiens
  misc_feature 1..62: note = U/M: U (0.24:0.88) in Gastric + Small Intes. Epithelium
  misc_feature 1..62: note = source = chr11:125048827-125048888; Gene: PKNOX2 (intron)
  source 1..62: mol_type = genomic DNA
cgggacaatgaaaggagatagcccgtgtaaagtgcacggtgtggtgtcgggctcggatggcg

SEQ ID NO: 6625 - DNA, 78 bp, Homo sapiens
  misc_feature 1..78: note = U/M: U (0.28:0.92) in Gastric + Small Intes. Epithelium
  misc_feature 1..78: note = source = chr3:39196897-39196974; Gene: CSRNP1 (Intergenic)
  source 1..78: mol_type = genomic DNA
cgaactcttgacctcagatgatccacccgccttggcctcccaaagtgctggaattacaggtgtgagccaccgcgcccg

SEQ ID NO: 6626 - DNA, 119 bp, Homo sapiens
  misc_feature 1..119: note = U/M: U (0.16:0.8) in Gastric + Small Intes. Epithelium
  misc_feature 1..119: note = source = chr13:114312460-114312578; Gene: ATP4B (promoter-TSS)
  source 1..119: mol_type = genomic DNA
cgtccctggcctgagatcctcccgtctgctccctgcaccctctacgcccagactgaggccagatgcccacctctgggctttatagtttcctctgccagaggtcaaaggcatcgcaggcg

SEQ ID NO: 6627 - DNA, 190 bp, Homo sapiens
  misc_feature 1..190: note = U/M: U (0.24:0.88) in Gastric + Small Intes. Epithelium
  misc_feature 1..190: note = source = chr7:104639370-104639559; Gene: LOC100216546 (Intergenic)
  source 1..190: mol_type = genomic DNA
cggtggttcacgcctgtaatcccagcactttgggaggccgaggtgggcggatcacctgaggtcaggagttccacaccagcctggccaacatggtgaaaccctgtctctactaaaaataaaaaattagccaggtgtggttgcaggcacctgtagttacagctactcaggaggctgaggttactgtgagccg

SEQ ID NO: 6628 - DNA, 78 bp, Homo sapiens
  misc_feature 1..78: note = U/M: U (0.28:0.91) in Gastric + Small Intes. Epithelium
  misc_feature 1..78: note = source = chr10:121489841-121489918; Gene: INPP5F (intron)
  source 1..78: mol_type = genomic DNA
cgaactcctgacctcaggtgatccaccctccccggcctcccgaagtgctgggattacaggcatgagccaccgcgcccg

SEQ ID NO: 6629 - DNA, 116 bp, Homo sapiens
  misc_feature 1..116: note = U/M: U (0.17:0.8) in Gastric + Small Intes. Epithelium
  misc_feature 1..116: note = source = chr8:11407620-11407735; Gene: BLK (exon)
  source 1..116: mol_type = genomic DNA
cgaggagcagggtcgctctgagtttcacctgttcctgccgttttccaggtggttctttagatcacagggtcggaaggaggctgagaggcagcttcttgctccaatcaacaaggccg

SEQ ID NO: 6630 - DNA, 141 bp, Homo sapiens
  misc_feature 1..141: note = U/M: U (0.25:0.88) in Gastric + Small Intes. Epithelium
  misc_feature 1..141: note = source = chr9:131838134-131838274; Gene: DOLPP1 (Intergenic)
  source 1..141: mol_type = genomic DNA
cggaagggggaaccccttataaaaccatcagatctcgtgagacttattcactaccataggaacagtatgggggtaaccacctccatgattcaattacctcccaccgggtccctcccacaacacgtgggaattatgggagcg

SEQ ID NO: 6631 - DNA, 163 bp, Homo sapiens
  misc_feature 1..163: note = U/M: U (0.23:0.86) in Gastric + Small Intes. Epithelium
  misc_feature 1..163: note = source = chr5:22095854-22096016; Gene: CDH12 (intron)
  source 1..163: mol_type = genomic DNA
cgaccccttatctctgcaccccgatcccttaattccacaccccaacctcttatctctgtgctctgatcccttacttccatgccccaacctcttatctctgcgccccgatcccttatttccgtgccccgacctcttatctctgcaccacgatcccttatttccg

SEQ ID NO: 6632 - DNA, 474 bp, Homo sapiens
  misc_feature 1..474: note = U/M: U (0.26:0.89) in Gastric + Small Intes. Epithelium
  misc_feature 1..474: note = source = chr2:67365757-67366230; Gene: LOC644838 (intron)
  source 1..474: mol_type = genomic DNA
cggaaacaaaagactgggcccaatagctgccccagaagagaaagtcttaagtagttaattattaataattttatccctattctctaaataaattcttggtttcaatacaacactcatttgtattcaggaagcacctggcctctttagagcaatctctgatggtttgcaaggagcttttgtcttggattaaattagtgatagagttaaaatattgatacggacattaccatttccttcatgataaaataaatgctttccaaataatagtgtaatcattaatgcctacgcgtaaaagataaagaaaaaagtccagttttgttcctgatttgagataccactttatcacatagtaaatttctgtatgaacttgcgtctatgtctggtggttctcttctagtctgttgatctgtctattcaggtatcagtaccacactgcttcaattatagaggttgtgtaatgcattttaatgttcg

SEQ ID NO: 6633 - DNA, 116 bp, Homo sapiens
  misc_feature 1..116: note = U/M: U (0.28:0.89) in Gastric + Small Intes. Epithelium
  misc_feature 1..116: note = source = chr13:49945486-49945601; Gene: CAB39L (intron)
  source 1..116: mol_type = genomic DNA
cggctaatttttgtatttttagtacagatagggttttgccacgttggcgaggctggtctcgaactcctgaatttaggtatcccaaaatgctgggattacagacgtaagccaccacg

SEQ ID NO: 6634 - DNA, 363 bp, Homo sapiens
  misc_feature 1..363: note = U/M: U (0.28:0.89) in Gastric + Small Intes. Epithelium
  misc_feature 1..363: note = source = chr8:140787482-140787844; Gene: TRAPPC9 (intron)
  source 1..363: mol_type = genomic DNA
cggaagctctgaggggctgactcccagtcacagggtgagttctctttgcttgcttctctaataaaagcaaactagatgagaatattggtctctggagaccgagccgagccctgattattcattccctttgtgtcttccattcctgtaaacattttccctttgcacaggctgataaatttgcttttcccagaaatgcttaagaaaaggcctttggcctgggctgggcccagagcgtgttgttctcagctagaaatcactgaccgcttttctggggcgctgggaagtcaaggggccgaggccacatctccaggggaagggtgtgggctaactgggggcacggcggcagcccagggctgagtcccg

SEQ ID NO: 6635 - DNA, 412 bp, Homo sapiens
  misc_feature 1..412: note = U/M: U (0.24:0.85) in Gastric + Small Intes. Epithelium
  misc_feature 1..412: note = source = chr6:37703053-37703464; Gene: MDGA1 (Intergenic)
  source 1..412: mol_type = genomic DNA
cgccaggtgagaccatgagcacagcacccaggtaaactttgggctgcagtctcagcagaggtttaactggaaaaagatctgcttccaagctccatcagatcccgggcagagttcatttccttacttggtggcttgattcttcaaggccaacaggagtctttcacctcaaggacggcgtcagttccttttttagggcctttcccctgattaagtcaggcccacacagggtaatatcccttttttattgaattaaaatcaactggttttgagctgctaaatctcttcacctttgacacagtctatggactagaggcaaaccacaggtcccacccacactcgaggggaggggattatacaagggcatgtctctctggcatggggtcactttagaatgtgtccaaccaacatgccg

SEQ ID NO: 6636 - DNA, 96 bp, Homo sapiens
  misc_feature 1..96: note = U/M: U (0.24:0.84) in Gastric + Small Intes. Epithelium
  misc_feature 1..96: note = source = chr17:9851673-9851768; Gene: GAS7 (intron)
  source 1..96: mol_type = genomic DNA
cgatgtgtatcatacgaacaaatacaccttaaaattataatctggggggccgggcacggcagttcacgcctgtaatcccagcactttgggaggccg

SEQ ID NO: 6637 - DNA, 168 bp, Homo sapiens
  misc_feature 1..168: note = U/M: U (0.3:0.9) in Gastric + Small Intes. Epithelium
  misc_feature 1..168: note = source = chr17:46028254-46028421; Gene: PRR15L,PRR15L (Intergenic,TTS)
  source 1..168: mol_type = genomic DNA
cggagttttgctcttgttgcccaggctggagtgcaatagagctatctcggctcaccgcaacctcggcctcctgggttcaagcaattctcctgcctcagccttccaagtagctgggattacaggtatgtgccaccacacttggctaattttgtatttttagtagagacg

SEQ ID NO: 6638 - DNA, 174 bp, Homo sapiens
  misc_feature 1..174: note = U/M: U (0.29:0.89) in Gastric + Small Intes. Epithelium
  misc_feature 1..174: note = source = chr2:235886360-235886533; Gene: SH3BP4 (intron)
  source 1..174: mol_type = genomic DNA
cgtagatgatttttttttgcttatgcagttagtgcacagagtgagccctgcgctgggaaagacacgcacacgcatatgcacacacatgggcacacacacacatgcgtgcacacacacgcagaccctgagaccctgcacttgagtttctagtcttaagcaagaagggtgtcaccg

SEQ ID NO: 6639 - DNA, 206 bp, Homo sapiens
  misc_feature 1..206: note = U/M: U (0.3:0.9) in Gastric + Small Intes. Epithelium
  misc_feature 1..206: note = source = chr1:29534755-29534960; Gene: MECR (intron)
  source 1..206: mol_type = genomic DNA
cggcctcccagagtgctgggattacaggcgtgagccactgcgcccggcctgactcaggtagttttaggcaacaaagcataaaagtagaagtcaagagcacagatgccaaacctggttttgctattctgctagtttgagaaaattcctgtcactgagttttagttactctaatgtgtaaatagcacaggcaagaacagcctgactcg

SEQ ID NO: 6640 - DNA, 371 bp, Homo sapiens
  misc_feature 1..371: note = U/M: U (0.27:0.87) in Gastric + Small Intes. Epithelium
  misc_feature 1..371: note = source = chr14:90164823-90165193; Gene: FOXN3-AS2 (Intergenic)
  source 1..371: mol_type = genomic DNA
cgtacttttcaagaattatctcatttacctcttaaaaatacccaaacttaacgagttaagtcctattatccccactttacagatggggagcctggggcctagagaggttaaaaaaacatgatcaaagtctcaaagctagtgttagaagcaggactcgaatccttggttaagtccagagtctgttctcttaactaccgcacactatttcctcttcaaatgcaaaggagtgctttgagaattttaggtggccttgcaacttgatgggaaaaaattattttaggatttcaggatgatggagtcttctaccaacacaagcatttgtattttactgagatcaggagagctaaatataagacagtaggagctaaacg

SEQ ID NO: 6641 - DNA, 458 bp, Homo sapiens
  misc_feature 1..458: note = U/M: U (0.28:0.88) in Gastric + Small Intes. Epithelium
  misc_feature 1..458: note = source = chr5:67613688-67614145; Gene: PIK3R1 (Intergenic)
  source 1..458: mol_type = genomic DNA
cgctctcaggagcaaggtccacagcagtgattcgcataagaattcacgtgagacttatctggggagaccttcaaaagtgatctagaattgcattccagcattgccatgttccaaaaagttcccaggtgattctaaggggagtaaaaactgccgcctacacgttcagctttatctcattcagtttacaaagctttgattcctgcttttacagccacccaggagtatatgcattttaagttgttacctgatcattgtaaatgaatatcaatgaagtagctatctagtgatgtaggggtggagagaacgcaggtggttaagaagggtagaaactgttctgaggtggaaggctacaaaggaggggctctgaggatcaaagggaatttttttgttgtagaaggtatcaggaaacatttcaaaagactgaaaggggcaaaaacaatgactggagtctgggatcg

SEQ ID NO: 6642 - DNA, 51 bp, Homo sapiens
  misc_feature 1..51: note = U/M: U (0.31:0.9) in Gastric + Small Intes. Epithelium
  misc_feature 1..51: note = source = chr2:40228745-40228795; Gene: SLC8A1-AS1 (intron)
  source 1..51: mol_type = genomic DNA
cgcctcggcctcccaaagtgctgggattacaggcgtgagccaccgtgcccg

SEQ ID NO: 6643 - DNA, 148 bp, Homo sapiens
  misc_feature 1..148: note = U/M: U (0.3:0.89) in Gastric + Small Intes. Epithelium
  misc_feature 1..148: note = source = chr1:60955862-60956009; Gene: C1orf87 (Intergenic)
  source 1..148: mol_type = genomic DNA
cgaggcagaagacaggtgatttctgcatttccatctgaggtaccaggttcatctcactagggagtgccagagagtgggctcaggtcagtgggtgcgcgcactgtgcgcgagccgaagcagggcgaggcattgcctcacttgggaagcg

SEQ ID NO: 6644 - DNA, 186 bp, Homo sapiens
  misc_feature 1..186: note = U/M: U (0.28:0.86) in Gastric + Small Intes. Epithelium
  misc_feature 1..186: note = source = chr4:7211949-7212134; Gene: SORCS2 (intron)
  source 1..186: mol_type = genomic DNA
cgcccacccactcacttcctctgtgtgctgagggctgggctttctacccttgacccttattatcaccattatttaaaatagaggcggggcttctctgtggctcaggctggagtgcaatgctgcgatcttggctcactgcagcctccaacccctgggctcacgccctcctcctgcctcggccttccg

SEQ ID NO: 6645 - DNA, 202 bp, Homo sapiens
  misc_feature 1..202: note = U/M: U (0.32:0.9) in Gastric + Small Intes. Epithelium
  misc_feature 1..202: note = source = chr3:33098511-33098712; Gene: GLB1 (intron)
  source 1..202: mol_type = genomic DNA
cgaactataatccccagtgttggaggtagggcctggtggcaggcgactggatcgtgggggcaaagtgcttgtgaatgggttagcaccatcccctcagtgctattctcctgatagtgagtgaatgagttatgagatctggttgtttaaaagtatgtagcacttcccttcctatctcttcctcccgctctgtccatgtaagacg

SEQ ID NO: 6646 - DNA, 208 bp, Homo sapiens
  misc_feature 1..208: note = U/M: U (0.29:0.87) in Gastric + Small Intes. Epithelium
  misc_feature 1..208: note = source = chr8:124537847-124538054; Gene: FBXO32 (intron)
  source 1..208: mol_type = genomic DNA
cgaaaggagagaacactggagcaggagtcggagaaccaggcttaggtcctgcctttattccacgtcccttcctgggcaggcaactttgtgcaaatcacccagttccctggcctctgcttcctcacctctaaaatgggttaacaacatctgcctactgtacagcttgactgtgcttatcaaagacgtagatatacaaagatggaattcg

SEQ ID NO: 6647 - DNA, 387 bp, Homo sapiens
  misc_feature 1..387: note = U/M: U (0.31:0.89) in Gastric + Small Intes. Epithelium
  misc_feature 1..387: note = source = chr5:1319823-1320209; Gene: CLPTM1L (intron)
  source 1..387: mol_type = genomic DNA
cgggggagggagatgggaaaagggaccttgagggccagagaaaggacacagccaggaggctctgagacacttggcagcaggtcttgggggtgacacacactccttcgacccctggacaaggccctggggccggcactggaggtgagggcagtgcttgcagtggtccagatgcaaccctcccgaggggagccccagatccctggctcctaccctggcacagcagagctggagggaggttttgctgactgagagggcagatgtcagccctggagggaagcgggaggcccagggtggggcctgagcctctgcatttggaaaattccgaggcccggggtggggcctgaacctctgcctttagaaaattccacaaagccttttcctcagccg

SEQ ID NO: 6648 - DNA, 294 bp, Homo sapiens
  misc_feature 1..294: note = U/M: U (0.3:0.86) in Gastric + Small Intes. Epithelium
  misc_feature 1..294: note = source = chr7:36119355-36119648; Gene: EEPD1 (Intergenic)
  source 1..294: mol_type = genomic DNA
cgctgtgaggctatggggacttccagaccagggcagagcccccacattctctgcactcttgggcagggattttaaccaccagcccctgcttcctcccctgtcactgtctgggaatgtgggttctggagtcctactgcctgggtcagagtccaccccaccaggcagctctgcttggacttagttatctaagcctcggtttctttacctggataatgagcgtgataataatgacacccacctcttaaagtgagagacttgacaaagctagcgtgggtccagctcagtgcctgggcg

SEQ ID NO: 6649 - DNA, 102 bp, Homo sapiens
  misc_feature 1..102: note = U/M: U (0.32:0.87) in Gastric + Small Intes. Epithelium
  misc_feature 1..102: note = source = chr4:57163146-57163247; Gene: KIAA1211 (intron)
  source 1..102: mol_type = genomic DNA
cgcaatcttggctcactgcaatccccgcctcccgggttcaagcgattctcccatctgagtctcccaagtagctgggattataggcgccagccatcatgcccg

SEQ ID NO: 6650 - DNA, 197 bp, Homo sapiens
  misc_feature 1..197: note = U/M: U (0.29:0.84) in Gastric + Small Intes. Epithelium
  misc_feature 1..197: note = source = chr2:165235177-165235373; Gene: GRB14 (Intergenic)
  source 1..197: mol_type = genomic DNA
cgtgcatttaagtactaatacttttaaaaggactatgggctttatctgtggaactgatttcttattgtcttactatcttaaactaaacaagcaaattgggcccacattatggatgacgagcgagaaggacaaacagtcccgattagcaaaattaatatcctagataaacagagaattaaaagccagatatgtaatcg

SEQ ID NO: 6651 - DNA, 218 bp, Homo sapiens
  misc_feature 1..218: note = U/M: U (0.28:0.83) in Gastric + Small Intes. Epithelium
  misc_feature 1..218: note = source = chr2:106226918-106227135; Gene: LOC285000 (promoter-TSS)
  source 1..218: mol_type = genomic DNA
cgtgtctagatttctgaaggatgagtcttttgatttgtttctaacctgcttaaaagagatggggaggcggaggaagcaaggagccgaggtgcagccggatgcctcccaggatgaataatggcaacaagaaacagagttcttaaagcccagatgataagggcctcagtctgggtgtgaatgaacttggcctgacttctttgctgccgtcatatgaaccg

SEQ ID NO: 6652 - DNA, 72 bp, Homo sapiens
  misc_feature 1..72: note = U/M: U (0.28:0.82) in Gastric + Small Intes. Epithelium
  misc_feature 1..72: note = source = chr1:60956073-60956144; Gene: C1orf87 (Intergenic)
  source 1..72: mol_type = genomic DNA
cgggtcactcccacccgaatactgcgcttctccaacgggcttaaaaaacggcgcaccacgagattatctccg

SEQ ID NO: 6653 - DNA, 78 bp, Homo sapiens
  misc_feature 1..78: note = U/M: U (0.3:0.84) in Gastric + Small Intes. Epithelium
  misc_feature 1..78: note = source = chr8:113384800-113384877; Gene: CSMD3 (intron)
  source 1..78: mol_type = genomic DNA
cgggcgcggtggctcatgcctgtaatcttagcactttgggaggccgaggagggcggattgcctgagcacaggagttcg

SEQ ID NO: 6654 - DNA, 96 bp, Homo sapiens
  misc_feature 1..96: note = U/M: U (0.34:0.88) in Gastric + Small Intes. Epithelium
  misc_feature 1..96: note = source = chr9:139469784-139469879; Gene: MIR4674 (Intergenic)
  source 1..96: mol_type = genomic DNA
cgggattacaggcctgagccaccgcgcccggccctgataaggctgttacacctcagcgtccgggacacaatttggttacttagaacatcagcaacg

SEQ ID NO: 6655 - DNA, 242 bp, Homo sapiens
  misc_feature 1..242: note = U/M: U (0.4:0.94) in Gastric + Small Intes. Epithelium
  misc_feature 1..242: note = source = chr12:110913690-110913931; Gene: FAM216A (intron)
  source 1..242: mol_type = genomic DNA
cgccaccacacccagctaatttttatatttttagtagagataggagtcttgccaagttgcccaggctggtctcaaactcctgggctcaagcaatctgaacacctcggcctcccaaagtgctgggattacaggcgtgagccaccacgcctggcctatcttaactacatttatttatctcacaaaataattatccaaatcaagaacttgaaatactgttatctatagaccttattaagatatcg

SEQ ID NO: 6656 - DNA, 356 bp, Homo sapiens
  misc_feature 1..356: note = U/M: U (0.32:0.86) in Gastric + Small Intes. Epithelium
  misc_feature 1..356: note = source = chr13:42004907-42005262; Gene: OR7E37P (Intergenic)
  source 1..356: mol_type = genomic DNA
cgttatctgtaataccctagaaggacgttactcctaatatgtcacaggagtgtacacgctttgatgttatttatcatctcatagagagatattacttcaaatatcacagtggatgtacacacatagtgtataccctgtgatagcattcataatatcctagggagatacaactcctgatatcacagtgcgtgtagcccgtgtgtgtacacccttgatattagtcatactatccagggtaaatattactcctcatatcacacagtatgcacaccctgtgatatttttcatcctactttagggagatattgcttctaatatcacagtgggtgtaccccatgtgtgtatactccgtcacg

SEQ ID NO: 6657 - DNA, 130 bp, Homo sapiens
  misc_feature 1..130: note = U/M: U (0.32:0.85) in Gastric + Small Intes. Epithelium
  misc_feature 1..130: note = source = chr6:43610802-43610931; Gene: RSPH9 (Intergenic)
  source 1..130: mol_type = genomic DNA
cggaacaaaacaggatagggattttcacagtgcttttctatacaatgtctgtaatctatagataaccgattaggtcaggggtcgatctttaactaccaggcccggggcgcggtgctgggctgtctgcccg

SEQ ID NO: 6658 - DNA, 491 bp, Homo sapiens
  misc_feature 1..491: note = U/M: U (0.36:0.89) in Gastric + Small Intes. Epithelium
  misc_feature 1..491: note = source = chr13:110857417-110857907; Gene: COL4A1 (intron)
  source 1..491: mol_type = genomic DNA
cgtgatatctttctgtattttctattgctttatgatcaggaaaaaaataatctactaccaaaaaaagatataaaaatttgaatgaatggcacatttcatatatttttattttgtaaaaaatcatgaacataaaggaaaccactaaattgtgtttttacccagaagaagcataaatgatttttttcccttgagtacagagtcctttattctaggaaagaataaacagacttctgggttgaattggaaagtgaagataaaggctcacaatagtgccagcgtttacctgcgggccctggcggcctatgagtcctgggtacccgggttcaccaggaaaaccctgaaaccgaagagagaagcagtaaccgtcagaggccagtggtaggaacagtgagcctgcttgtaaaaaccacagagaaacacttacgggactccctttttcccctttgtcaccatcttttccgggtttgccctgtagaataaagatgtaaacg

SEQ ID NO: 6659 - DNA, 148 bp, Homo sapiens
  misc_feature 1..148: note = U/M: U (0.3:0.82) in Gastric + Small Intes. Epithelium
  misc_feature 1..148: note = source = chr5:273394-273541; Gene: PDCD6 (intron)
  source 1..148: mol_type = genomic DNA
cgctggccaggggattatggggaggtgttcttatcagtgtgcgaatactgggcgttcaggcagcgggaaatccgggtccttgcgtgttgtgagctccctggaattacgttcttgccagtttcagctcagttgatccccctcccctccg

SEQ ID NO: 6660 - DNA, 166 bp, Homo sapiens
  misc_feature 1..166: note = U/M: U (0.32:0.84) in Gastric + Small Intes. Epithelium
  misc_feature 1..166: note = source = chr19:45695965-45696130; Gene: BLOC1S3 (Intergenic)
  source 1..166: mol_type = genomic DNA
cgccttgaagctagagcctggaatggggccctcaggaccctgcttggtgcgctatcctacggtggctgagctgatatccaaggtgcaaaacaaagacctctttattcttcccgcttatctcctccagtgtgaggaagacatttcaagccaggcgtggtggctcacg

SEQ ID NO: 6661 - DNA, 187 bp, Homo sapiens
  misc_feature 1..187: note = U/M: U (0.36:0.88) in Gastric + Small Intes. Epithelium
  misc_feature 1..187: note = source = chr17:71369565-71369751; Gene: SDK2 (intron)
  source 1..187: mol_type = genomic DNA
cggaacttccataccgttatccataatggctgtactgatatacgttcccaccaacagcgtgcaaaggttcccttttccccatacgcttaccaccacttatctctagactttttgataacagccatccttgcaggtgtgatgggatatctcactgtggttttgatttgcatttccctgatgctgagcg

SEQ ID NO: 6662 - DNA, 187 bp, Homo sapiens
  misc_feature 1..187: note = U/M: U (0.3:0.82) in Gastric + Small Intes. Epithelium
  misc_feature 1..187: note = source = chr17:79824280-79824466; Gene: ARHGDIA (Intergenic)
  source 1..187: mol_type = genomic DNA
cggaatcaagggctgggggctgacccaggctttctctatagctgcttccagatctgggtctggaccagcttctgcaggaaggcaccattctgttggggtgtctgacacggtcagctctaggctcagcctctgcggcccccacaaaggcctagcaaggatggggcaaggtggcagtggtgcccgcacg

SEQ ID NO: 6663 - DNA, 193 bp, Homo sapiens
  misc_feature 1..193: note = U/M: U (0.38:0.9) in Gastric + Small Intes. Epithelium
  misc_feature 1..193: note = source = chr16:9002983-9003175; Gene: USP7 (intron)
  source 1..193: mol_type = genomic DNA
cggactctaagctcttgccctgctctatcactgctccatcttggccagctctttgttcctcagtaaaatcaggctttgcctatctcgaccacggccaggcggtcaggggccctcactccatgtctgactcacagctctatttccaatgcagaccttccttctggctggaaatccacctgcccagcagccagcg

SEQ ID NO: 6664 - DNA, 225 bp, Homo sapiens
  misc_feature 1..225: note = U/M: U (0.42:0.92) in Gastric + Small Intes. Epithelium
  misc_feature 1..225: note = source = chr11:126073383-126073607; Gene: RPUSD4,RPUSD4 (exon,intron)
  source 1..225: mol_type = genomic DNA
cggtgcagggaatgcacaaagaagcgaggaagtttgcagaccaagttgagttcctccttcccggaccccagggcaggcaggatcagctgccgggcgtgcaggtgaagggggatgtagcgggccttcgactgttctagccccagcttcttcagggtgcccacagacagcttctatacaaagaaaggacagacccttgagagcaaggccaacagtccacccttgacg

SEQ ID NO: 6665 - DNA, 63 bp, Homo sapiens
  misc_feature 1..63: note = U/M: U (0.37:0.86) in Gastric + Small Intes. Epithelium
  misc_feature 1..63: note = source = chr11:1377044-1377106; Gene: LOC255512 (Intergenic)
  source 1..63: mol_type = genomic DNA
cggggtttcaccgttttagccgggatggtcacgatctcctgacctcgtgatctgcccgcctcg

SEQ ID NO: 6666 - DNA, 115 bp, Homo sapiens
  misc_feature 1..115: note = U/M: U (0.36:0.85) in Gastric + Small Intes. Epithelium
  misc_feature 1..115: note = source = chr17:70452771-70452885; Gene: LINC00673 (intron)
  source 1..115: mol_type = genomic DNA
cgactccctcttccattctctttttttttttttttttgagatggagtctcgctctgtttgcccaggctggagtgcagtggcacgatctcggctcactgcaacctctgcttccccg

SEQ ID NO: 6667 - DNA, 202 bp, Homo sapiens
  misc_feature 1..202: note = U/M: U (0.34:0.82) in Gastric + Small Intes. Epithelium
  misc_feature 1..202: note = source = chr6:108170278-108170479; Gene: SCML4 (Intergenic)
  source 1..202: mol_type = genomic DNA
cgccccacgcggctcttcccccaccccgcccgtcccccagcaagttaagggcagagtggtcagagccaacgctgtattcaagatggctaattttattggtcagtttggccagaccaaggtacccagatacttggtcaaacattgatctggatgttgctgtgaatgtatttttcagataagaataacatttaaggtggggccg

SEQ ID NO: 6668 - DNA, 273 bp, Homo sapiens
  misc_feature 1..273: note = U/M: U (0.34:0.82) in Gastric + Small Intes. Epithelium
  misc_feature 1..273: note = source = chr16:85963633-85963905; Gene: IRF8 (Intergenic)
  source 1..273: mol_type = genomic DNA
cgaatctggccacagagctgcaacgacagaattcagcgactgcagcagaggccgtgcggccccccaggccgaaaatattcactatctgcctctttccagctttccagagaaagtctgtgacctctgtgtgagacccacccacacccatgagattagtccctttgcaaatcccttccttgaattaacctgtgttgagtgtgccaatggctgtctgggacctacccggcacgcattctattatcctgacgtcctcttagcctggcaacattctcg

SEQ ID NO: 6669 - DNA, 149 bp, Homo sapiens
  misc_feature 1..149: note = U/M: U (0.34:0.81) in Gastric + Small Intes. Epithelium
  misc_feature 1..149: note = source = chr7:98764851-98764999; Gene: SMURF1 (Intergenic)
  source 1..149: mol_type = genomic DNA
cggagatctaccagactaccttcttcacctccttcagggccagccttgccttagcacagcagtctctaatccctagaccagtccgtagcctgataggaaccgggccacccagcaggaggtgagcagcaggtgagcgaagctgagctccg

SEQ ID NO: 6670 - DNA, 243 bp, Homo sapiens
  misc_feature 1..243: note = U/M: U (0.36:0.82) in Gastric + Small Intes. Epithelium
  misc_feature 1..243: note = source = chr15:77867751-77867993; Gene: LINGO1 (Intergenic)
  source 1..243: mol_type = genomic DNA
cggtggccactggtataaggaaggggaggtgctggagttgagctctgaaggaaggtaggcagggcaccctgagtttccttccaacaaacgctgagcgagccaggccctttttttaaacagggagactgagaggaagggagtcattgcagacacaagaaaccccactttagcagaatccctcatcaactgcccggccctccatcccatcccatcctattggaggccagaactggtgagtctgcg

SEQ ID NO: 6671 - DNA, 314 bp, Homo sapiens
  misc_feature 1..314: note = U/M: U (0.37:0.82) in Gastric + Small Intes. Epithelium
  misc_feature 1..314: note = source = chr5:13524633-13524946; Gene: DNAH5 (Intergenic)
  source 1..314: mol_type = genomic DNA
cgctaagatgtaggtactgttagccacattccagaggtcacaagatttgcaacttccccaattcactattgtagaagctaaaattggccttttgagatatcctttcaggcttttgcatttctgacaaccagatggccccacccagacctgaaactcttggctcaactagtcttgcggcccccacccagaagcagacttagcacacgaggaacattttccacaccctaaccaatcagcagcacccattcccttggccaccaaactgaggcagcgttccatttgcaggggcactagctccagggggggtggcggcg

SEQ ID NO: 6672 - DNA, 82 bp, Homo sapiens
  misc_feature 1..82: note = U/M: U (0.36:0.8) in Gastric + Small Intes. Epithelium
  misc_feature 1..82: note = source = chr19:48106478-48106559; Gene: GLTSCR1 (Intergenic)
  source 1..82: mol_type = genomic DNA
cgcgatcttggctcactgcaacctccggcttccggattcaaacaattctctgtcctcagcctcctgagtagctgggattacg

SEQ ID NO: 6673 - DNA, 145 bp, Homo sapiens
  misc_feature 1..145: note = U/M: U (0.32:0.8) in Gastric + Small Intes. Epithelium
  misc_feature 1..145: note = source = chr4:134189379-134189523; Gene: PCDH10 (Intergenic)
  source 1..145: mol_type = genomic DNA
cggagggaaggggttcgggggttcttaccctccagaaaagtgtggaaggcatcggggtgtggaaataaggagttggggagcagagataagaggtcggggcgtggaaataagggatcggtgatcagagataagacgtcagggcgcg

SEQ ID NO: 6674 - DNA, 56 bp, Homo sapiens
  misc_feature 1..56: note = U/M: U (0.11:0.89) in Gastric + Small Intes. Epithelium
  misc_feature 1..56: note = source = chr9:113028863-113028918; Gene: TXN (Intergenic)
  source 1..56: mol_type = genomic DNA
cggaggttgcagtgagccgagatggcgccactgcattccagcctgggcgacagggc

SEQ ID NO: 6675 - DNA, 196 bp, Homo sapiens
  misc_feature 1..196: note = U/M: U (0.04:0.9) in Gastric + Small Intes. Epithelium
  misc_feature 1..196: note = source = chr1:19711383-19711578; Gene: CAPZB (intron)
  source 1..196: mol_type = genomic DNA
cgtcccaccctgaacagactttgcactggctgtatgaatcacatcatacagttaccagttacccaatgtgtctcctatgctagacctggtgatcagacacccagggcagggactaatgtcaacttagttatttacagccttgggcgaggtgacggaaagagagaggagagttgtgtatctgacagagctgcgttcg

SEQ ID NO: 6676 - DNA, 185 bp, Homo sapiens
  misc_feature 1..185: note = U/M: U (0.02:0.86) in Gastric + Small Intes. Epithelium
  misc_feature 1..185: note = source = chr20:9361360-9361544; Gene: PLCB4 (intron)
  source 1..185: mol_type = genomic DNA
cgcacaaatatttgtcaaaggaaaggcatggggagaaattttaaaatcagtcccacagcagtgagaaatgcctgcggaacatgggagggagagctgggggtacctgagctagagcctttggcgttatgtctcagtggagaatgtaaagagatgaaagttcaagttccataggtcccgtatgtccg

SEQ ID NO: 6677 - DNA, 161 bp, Homo sapiens
  misc_feature 1..161: note = U/M: U (0.11:0.9) in Gastric + Small Intes. Epithelium
  misc_feature 1..161: note = source = chr15:41842836-41842996; Gene: RPAP1 (Intergenic)
  source 1..161: mol_type = genomic DNA
cgtgctccgcctccatgtgggtggagcgcctacatacattatttggaattcttctgcatggaagaggtctgtgttccccattgattgattgattgattattattattttgagacagagtctggctctgttacccaggctggggtgcaatggcgcgatctcg

SEQ ID NO: 6678 - DNA, 55 bp, Homo sapiens
  misc_feature 1..55: note = U/M: U (0.12:0.9) in Gastric + Small Intes. Epithelium
  misc_feature 1..55: note = source = chr1:207182723-207182777; Gene: C1orf116 (Intergenic)
  source 1..55: mol_type = genomic DNA
cgtacggaggtggcttcatcttcagcatattgtgcccgtgtctcaagcaagcgcg

SEQ ID NO: 6679 - DNA, 176 bp, Homo sapiens
  misc_feature 1..176: note = U/M: U (0.09:0.87) in Gastric + Small Intes. Epithelium
  misc_feature 1..176: note = source = chr17:4144976-4145151; Gene: ANKFY1 (intron)
  source 1..176: mol_type = genomic DNA
cggacctttgccctctgaattcctagacaggtaagtcaattcctgcttgattagcaatgctatcaccatgactcccgcactctttgctgaagataagcagtgaacgagagacacaaatcttgcctcgggcccggcacggtggctcacgcttgtaatcccagcactctgggaggccg

SEQ ID NO: 6680 - DNA, 64 bp, Homo sapiens
  misc_feature 1..64: note = U/M: U (0.14:0.85) in Gastric + Small Intes. Epithelium
  misc_feature 1..64: note = source = chr1:168116137-168116200; Gene: GPR161 (Intergenic)
  source 1..64: mol_type = genomic DNA
cgtagaagccgggtgcggtggctctcgcctgtaatcccagcactttggaatgccgaggcgggcg

SEQ ID NO: 6681 - DNA, 152 bp, Homo sapiens
  misc_feature 1..152: note = U/M: U (0.18:0.89) in Gastric + Small Intes. Epithelium
  misc_feature 1..152: note = source = chr9:34050582-34050733; Gene: UBAP2 (Intergenic)
  source 1..152: mol_type = genomic DNA
cgggcgtggtggctcacacctgtaatctcagcactttgggagccggaggagggcggatcacaagatacggagtttgagaccagcctgaccaacacggtgaaaccccgtctctgttaaaaatacaaaaaaatgtccgggcgcggtggctcacg

SEQ ID NO: 6682 - DNA, 68 bp, Homo sapiens
  misc_feature 1..68: note = U/M: U (0.15:0.82) in Gastric + Small Intes. Epithelium
  misc_feature 1..68: note = source = chr14:74029365-74029432; Gene: HEATR4 (Intergenic)
  source 1..68: mol_type = genomic DNA
cgggaggtctataaacggccgctctgggaatgtctgtcttgtgccgttgagataaggactgagatacg

SEQ ID NO: 6683 - DNA, 149 bp, Homo sapiens
  misc_feature 1..149: note = U/M: U (0.22:0.89) in Gastric + Small Intes. Epithelium
  misc_feature 1..149: note = source = chr14:77437547-77437695; Gene: IRF2BPL (Intergenic)
  source 1..149: mol_type = genomic DNA
cgtcaccacggctggctaatttttgtatttttaatggagacggggtttcaccatgttggccaggctggtctcaaactcctgacctcaggtgatccgcccccatcagcctcccagggttttgggattacaggcgtgagccactgcgttcg

SEQ ID NO: 6684 - DNA, 380 bp, Homo sapiens
  misc_feature 1..380: note = U/M: U (0.18:0.84) in Gastric + Small Intes. Epithelium
  misc_feature 1..380: note = source = chr17:37211496-37211875; Gene: LOC100131347 (Intergenic)
  source 1..380: mol_type = genomic DNA
cggacctatcaagggctgaagtgataattcacagaggccaaacttatagtccaaaaaggaaagtagagtgtccactggaacccactggagcccactgtagccacgcccacaaaaggagaagaaactttgtcctgggaggccgctgactatacaaaggacaaagacatttctatgccaggtcttgttcctttatgtgagtgagatggaagtttgttgaagtttttatccaaatggacctgaggtttttctatctgtgcagccgtgggcatgtctccaggcacaacaccctgtgcctgttcccttatgggtgcctgcagcttgaatgttttcccaggctgctttttctgttgtgtggggatgaggcactgacctgtgggccg

SEQ ID NO: 6685 - DNA, 214 bp, Homo sapiens; identical to SEQ ID NO: 377
  misc_feature 1..214: note = U/M: U (0.22:0.86) in Gastric + Small Intes. Epithelium
  misc_feature 1..214: note = source = chr17:38844775-38844988; Gene: KRT24 (Intergenic)
  source 1..214: mol_type = genomic DNA

SEQ ID NO: 6686 - DNA, 221 bp, Homo sapiens
  misc_feature 1..221: note = U/M: U (0.28:0.91) in Gastric + Small Intes. Epithelium
  misc_feature 1..221: note = source = chr20:516121-516341; Gene: CSNK2A1 (intron)
  source 1..221: mol_type = genomic DNA
cgggcgcggtggctcacgcctgtaaccccagcactttgggaggctgaggcgggtggatcacctgaggtcaggagtttgaggccagcgtggccaacatggcgacaccccgcctctactaaaaatacaaaaattagcccggtggggtggcatgcacctgtaatcccagttacttaggaggctgagagaggagaatcacttgaacccaggaggcagagattgcg

SEQ ID NO: 6687 - DNA, 225 bp, Homo sapiens
  misc_feature 1..225: note = U/M: U (0.36:0.93) in Gastric + Small Intes. Epithelium
  misc_feature 1..225: note = source = chr9:19336284-19336508; Gene: DENND4C (intron)
  source 1..225: mol_type = genomic DNA
cgtggcctagcagtacccgcagtggtattttcttatggacgaaggtacggaatgtggtacgtggcttggcacagtttaggcagccgcttaaaaagactgtgcaaaggtcacaggtctcctcaatatcaggtaatacatgtgattagaaatataattccttactgaaccatgagctttataggcatatgaatttttagctatgtgaagtagaaaacttaaattccg

SEQ ID NO: 6688 - DNA, 66 bp, Homo sapiens
  misc_feature 1..66: note = U/M: U (0.38:0.94) in Gastric + Small Intes. Epithelium
  misc_feature 1..66: note = source = chr1:215745209-215745274; Gene: KCTD3 (intron)
  source 1..66: mol_type = genomic DNA
cgtgatctgcccgcctcggcctcccaaagtgctgggattacaggcgtgagccaccgcgcctagccg

SEQ ID NO: 6689 - DNA, 166 bp, Homo sapiens
  misc_feature 1..166: note = U/M: U (0.3:0.86) in Gastric + Small Intes. Epithelium
  misc_feature 1..166: note = source = chr18:60675645-60675810; Gene: PHLPP1 (Intergenic)
  source 1..166: mol_type = genomic DNA
cggcctcccaaagtgctgggattacaggcgtgagccaccacgcccggcctgctgtttcgcattcttaacaacaatatacgaaggtgcctgtttcctccaccctgatcacagaacgcttatcatagctgtgaatatttgccgatctgataggtgagaaatggcaccg

SEQ ID NO: 6690 - DNA, 256 bp, Homo sapiens
  misc_feature 1..256: note = U/M: U (0.28:0.76) in Gastric + Small Intes. Epithelium
  misc_feature 1..256: note = source = chr9:45746113-45746368; Gene: FAM27A (Intergenic)
  source 1..256: mol_type = genomic DNA
cgtgtatgtgtataaacatatattctgtgtgtgagtagccactcagctcttacttggcttcgcacatttggcccagattgttctgagcattgtaaactaaaagtgaaattcggtttctacttaagagagagcgtgattttcctcagtattatctcccgtgcccccaacactccaccaggctttaaaggccattatacagaagggagaactgagactccaggagatgggtggcttgttcagaatcacagaagcagcg

SEQ ID NO: 6691 - DNA, 241 bp, Homo sapiens
  misc_feature 1..241: note = U/M: M (0.59:0.14) in Gastric + Small Intes. Epithelium
  misc_feature 1..241: note = source = chr8:11553274-11553514; Gene: GATA4 (Intergenic)
  source 1..241: mol_type = genomic DNA
cgtcacccttcctgcagcctgcccaaaaacatgagtgcaccggcgctcgtatgtttgtgccatacatgctcaagataggcactggagctgtacccaggatggaccactgtggccattcctgtggactgaggatgagcaatagggaggaccaaccttgaaaaatgatcctttaaaaagaaatgcaaggctttcttttgtatagaaatcacttttctaacatattttagatgggagtcaaacg

SEQ ID NO: 6692 - DNA, 296 bp, Homo sapiens
  misc_feature 1..296: note = U/M: M (0.69:0.19) in Gastric + Small Intes. Epithelium
  misc_feature 1..296: note = source = chr5:7395230-7395525; Gene: ADCY2,ADCY2 (promoter-TSS,Intergenic)
  source 1..296: mol_type = genomic DNA
cgaccagccacggggcagctctgtaaacctgtgatatgacaggcttatacggcacctccaaagtgtgactgaagctgagcgtgcagggcgcaacggacgctgcccccgcgaggccgtggcgggggctcccagtgcagtcactgccgcttcacttccacatggtgccggtctccagttaggtcccctggcgtttccgcgccctgccgccctcgcagggagccccggccctctcaagagggtggagaggatgggggagccctcaaccctgctacgctgaggggaagaagggctggacg

SEQ ID NO: 6693 - DNA, 448 bp, Homo sapiens; identical to SEQ ID NO: 415
  misc_feature 1..448: note = U/M: M (0.56:0.06) in Gastric + Small Intes. Epithelium
  misc_feature 1..448: note = source = chr11:46317357-46317804; Gene: CREB3L1 (intron)
  source 1..448: mol_type = genomic DNA

SEQ ID NO: 6694 - DNA, 376 bp, Homo sapiens
  misc_feature 1..376: note = U/M: M (0.58:0.12) in Gastric + Small Intes. Epithelium
  misc_feature 1..376: note = source = chr8:11554732-11555107; Gene: GATA4 (Intergenic)
  source 1..376: mol_type = genomic DNA
cggagagcccctgtccttctgtcaaacacacgcacaggactaacgagggggatgagtggaaaccagccgcaaagaaatggagtgggaggttcttctttaaaatccattccgttcagaacacagtgaacaccctttgacagaacaaggactatctagctattccaagctccgtgcctcccctttcttgagactgttgttacaagaaaccgatgatttctaacaataggaacctcccagctggggaagcggtgttcggaggggagcagcgctctcggtgggcacctgctgcagttggggagggagaggtggtcgtggaggccactttcccctccaccgccagggaagcctggtctgtctgaaggggtcctcgcctgcg

SEQ ID NO: 6695 - DNA, 178 bp, Homo sapiens
  misc_feature 1..178: note = U/M: U (0.01:0.94) in Small Intes. + Colon Epithelium
  misc_feature 1..178: note = source = chr16:87489775-87489952; Gene: ZCCHC14 (intron)
  source 1..178: mol_type = genomic DNA
cgatttcggctacacactggaatcccagcacaacccaggaaaggccacagactgtgggcattttagaatttagattttagggctgggcgcagtggctcacgcctgtaatcccagcactttgggaagccgaggcgggcggatcacgaggtcaggagatcgagactatcctggctaacac

SEQ ID NO: 6696 - DNA, 173 bp, Homo sapiens
  misc_feature 1..173: note = U/M: U (0.03:0.95) in Small Intes. + Colon Epithelium
  misc_feature 1..173: note = source = chr21:45513359-45513531; Gene: TRAPPC10 (intron)
  source 1..173: mol_type = genomic DNA
cggggcgtggtggctcacacctgtaatcccagcactttgggaggccgaggcaggtggattgcctgagctcaggaattcaagaccagcctgggcaacacggtgaaaccctgtctctactagaatacaaaaaatgagctgggcatggcggcgtgcatctgtagtcccagctactc

SEQ ID NO: 6697 - DNA, 143 bp, Homo sapiens
  misc_feature 1..143: note = U/M: U (0.04:0.94) in Small Intes. + Colon Epithelium
  misc_feature 1..143: note = source = chr11:75859077-75859219; Gene: WNT11 (Intergenic)
  source 1..143: mol_type = genomic DNA
cgggcgtggtggcaggcgcctgcagtcccagctactcaggaggctgaggcaggagaatggcggaacccaggaggcggaggttggagtgagccgagatcgtgccactgcactccagcctgggcgacagagcgagactccatctc

SEQ ID NO: 6698 - DNA, 358 bp, Homo sapiens
  misc_feature 1..358: note = U/M: U (0.04:0.94) in Small Intes. + Colon Epithelium
  misc_feature 1..358: note = source = chr18:21882532-21882889; Gene: OSBPL1A (intron)
  source 1..358: mol_type = genomic DNA
cgtgccaccacgcccagctaatttttgtatctttagtagaaacggggtttcaccatgttgaccgtgctggtcttgaactcctgacctcaggtgatccaccgcctcggcctcccaaagtgccaggattacaggtgtgagccacagcgcccagccttgtaggctatttatagtcaactcttgagaactcataatagagaatgaagacataaaaagttattactgaaaggaagattaataattagctagacaagatcatatatacatttatagaagcataaaaggccaaggcctaaaacaaccaacttctttattttatggatgagggcactgaagctcgcaagagttaaaagtgttgttc

SEQ ID NO: 6699 - DNA, 73 bp, Homo sapiens
  misc_feature 1..73: note = U/M: U (0.04:0.92) in Small Intes. + Colon Epithelium
  misc_feature 1..73: note = source = chr2:47595738-47595810; Gene: EPCAM (promoter-TSS)
  source 1..73: mol_type = genomic DNA
cgaacttcaaacctcaggtgatccgcccgcctcggcctcccaaagtgctaggattacaggcgtgagccaccgc

SEQ ID NO: 6700 - DNA, 217 bp, Homo sapiens
  misc_feature 1..217: note = U/M: U (0.08:0.96) in Small Intes. + Colon Epithelium
  misc_feature 1..217: note = source = chr4:718410-718626; Gene: PCGF3 (intron)
  source 1..217: mol_type = genomic DNA
cgagaccagcctggccaacgtggtgaaacccccgtctctactaaaaatacaaaaaattagctgggtactcaggaggctgaggcaggagaatggtgtgaacccgggaggcggagcttgcagtgagccgagatcacgccactgcactccagcctgggcgacagagcgagattccgtctcacacacacacacaaaaaattagttgggtgtggtggtgcac

SEQ ID NO: 6701 - DNA, 175 bp, Homo sapiens
  misc_feature 1..175: note = U/M: U (0.06:0.94) in Small Intes. + Colon Epithelium
  misc_feature 1..175: note = source = chr15:34371984-34372158; Gene: EMC7 (Intergenic)
  source 1..175: mol_type = genomic DNA
cgaggtcaggagatcgagaccgtcctagctaacacagtgaaaccccatctctactaaaaatacaaacaattagccaggcatagtggcgggcacctgtagtcccagctacttgggaggctgaggcaggagaacggcatgaacccgggaggtggaggttgcagtgagctgagatcgc

SEQ ID NO: 6702 - DNA, 367 bp, Homo sapiens
  misc_feature 1..367: note = U/M: U (0.08:0.94) in Small Intes. + Colon Epithelium
  misc_feature 1..367: note = source = chr8:30633125-30633491; Gene: UBXN8 (Intergenic)
  source 1..367: mol_type = genomic DNA
cgctctcctgcttataggagctggctgcacctgctgttcttttgcttatgagaactggctgcacctgccgaacccccgttatcctaattctctattcgcctgccacaggaccacaggtgtgtgccatcacgcctggctatttatttatttatttattttcagatagcgtctcaccctgtggcccaggctgtagtgcaatggcacgatctcggctcactgcaccctccgcctcctgggttcaagcaattctcctgactcagcctccacaacctagttgatttctctcatgtaaaagcttacaggagctgggtggtgactcacgcctgtaatcccagcactttgggaggctgaggtggacagatcactc

SEQ ID NO: 6703 - DNA, 128 bp, Homo sapiens
  misc_feature 1..128: note = U/M: U (0.01:0.95) in Small Intes. + Colon Epithelium
  misc_feature 1..128: note = source = chr3:142322358-142322485; Gene: PLS1 (intron)
  source 1..128: mol_type = genomic DNA
cgcctataatcccagcactttgggaggctgaggcaggtggatcgcttgagctcaagagttcaacaccagcctgggcaacatggcaaaacatcgtctctacaaaaaaattatctgggcatggtggcgcg

SEQ ID NO: 6704 - DNA, 226 bp, Homo sapiens
  misc_feature 1..226: note = U/M: U (0.02:0.94) in Small Intes. + Colon Epithelium
  misc_feature 1..226: note = source = chr2:200806812-200807037; Gene: TYW5 (intron)
  source 1..226: mol_type = genomic DNA
cggagtcttgctctgtagcccaggctggagtgcagtggtgcagtctcggctcactgcaagctccgcctcccgggttcacgccattctcctgcctcagcctcccaagtagctgggactacaggcgtatgccaccatgcctggctaatttttttgtatttttagtagaggcggggtttcaccgtgttagccaggatggtctcaatctcctgacctcctgatccgcccg

SEQ ID NO: 6705 - DNA, 475 bp, Homo sapiens
  misc_feature 1..475: note = U/M: U (0.02:0.94) in Small Intes. + Colon Epithelium
  misc_feature 1..475: note = source = chr7:11119454-11119928; Gene: PHF14 (intron)
  source 1..475: mol_type = genomic DNA
cgtcatcctgttttttcttcttagtaacctttgatcataaatgacatgtcaataatcaggaaagctttatgacatagaaattaccaattgcatgtaactcaaaaagtgccatacttttgattgtcacttttgttgcatattgctagagctgattatacaaggaaacaaaatatgaatagactcagtggtctaaaagatggattcttgtcaactttaagaggatacatttttactacgaatgaatgtcataaagttattccacgtaaaatgagttcaaagtttatttgcacctgtgagaacataccaagtgtagttggatagaggaagtaacttgccaaaatagactttgtaagaattttgtagcattagattttcagttttagctttgatgtggagtacctaggtgtaggccctgtcacatcgttatttaaaaaacaataaaatttaaaaaaaacttgataacttatattacacg

SEQ ID NO: 6706 - DNA, 275 bp, Homo sapiens
  misc_feature 1..275: note = U/M: U (0.02:0.93) in Small Intes. + Colon Epithelium
  misc_feature 1..275: note = source = chr3:67749797-67750071; Gene: SUCLG2 (Intergenic)
  source 1..275: mol_type = genomic DNA
cggaaaagttattattattcatctatttattcattttttgaatacctcatatatactggacgaaggccaaatgctggagatgcaaaggtgaatgataccctgtttagtttacgttcagagttcacaaaagatggtataaaaaatattttcagatagcaagtcaagattacggaaaaaagtgatcatcgctcaaagtttcccggttcacacagttgcagcaatatatgtcaattatatagtctgacaaggcatttaattttgccgtatgtatttcg

SEQ ID NO: 6707 - DNA, 74 bp, Homo sapiens
  misc_feature 1..74: note = U/M: U (0.02:0.92) in Small Intes. + Colon Epithelium
  misc_feature 1..74: note = source = chr21:29077403-29077476; Gene: MIR5009 (intron)
  source 1..74: mol_type = genomic DNA
cgcctcaaagaattgaaaacacatcccccgcgccacccgcccctccacagagagtggaatattattcatcctcg

SEQ ID NO: 6708 - DNA, 176 bp, Homo sapiens
  misc_feature 1..176: note = U/M: U (0.02:0.92) in Small Intes. + Colon Epithelium
  misc_feature 1..176: note = source = chr17:26125232-26125407; Gene: NOS2 (intron)
  source 1..176: mol_type = genomic DNA
cgtcacacagctggctagaggcagcacccggcaactagtgcggccagcacagggcttggaactagtttgtctaacatcctgatgcccttcaccaggatgatattcaaagcatctagcaagcggtgaattggaatggacgcaggccaggatgctgaccctccacccccacccctccg

SEQ ID NO: 6709 - DNA, 223 bp, Homo sapiens
  misc_feature 1..223: note = U/M: U (0.02:0.91) in Small Intes. + Colon Epithelium
  misc_feature 1..223: note = source = chr5:116183774-116183996; Gene: SEMA6A (Intergenic)
  source 1..223: mol_type = genomic DNA
cgtattgcttcctcttttattgccctgcacatagcacccagagtgatccttctgaatagcgctcctgtactctgaacccttccgtcacgtaacagcccacaaggtgccatgcatccatgcattaaggccccgtactgtctttcttatcttctctccttccagcctctccttcaacctgtctcctccagtcagtcccgctggttttcttcctgcctccggaacg

SEQ ID NO: 6710 - DNA, 260 bp, Homo sapiens
  misc_feature 1..260: note = U/M: U (0:0.89) in Small Intes. + Colon Epithelium
  misc_feature 1..260: note = source = chr13:22906573-22906832; Gene: LINC00424 (Intergenic)
  source 1..260: mol_type = genomic DNA
cgaggatgcggacacagttgtcacaagtggagcagcaattttatactacaagacgaaatcctaaattgcagaaaccagagcaacaaggtagagcctataatgccaacagtgtggaactgcaatatcaatcctggtctttatatgagggaggagtgtctgtgtttttgaagcttttattaccttggactttgtcatagtaacttgatcaacatttggtaacggaagaggaatattgccttaacagctaaccgattaactcg

SEQ ID NO: 6711 - DNA, 290 bp, Homo sapiens
  misc_feature 1..290: note = U/M: U (0.04:0.93) in Small Intes. + Colon Epithelium
  misc_feature 1..290: note = source = chr17:57813499-57813788; Gene: VMP1 (intron)
  source 1..290: mol_type = genomic DNA
cgtggtggctcacacctataatcccagcactttgggaggtgggtggatcatctgaggtcaggaattcgagacctggccaacatggtgaaaccccgtctctactaaaaatataaaaattagccgggcgtggtggcatgtgcctgtagtcccagctactcaggaggctgaggcaggagaatcgcttgaacgtgggaggcagaggttgcagtgaaccgagatcatgccactgcactccagcctgggcaacagaacgatactctgtctcaaaaaaaaaaaaaattagccggtcg

SEQ ID NO: 6712 - DNA, 301 bp, Homo sapiens
  misc_feature 1..301: note = U/M: U (0.04:0.93) in Small Intes. + Colon Epithelium
  misc_feature 1..301: note = source = chr11:128295328-128295628; Gene: ETS1 (Intergenic)
  source 1..301: mol_type = genomic DNA
cgggatccctaaagcctcagtgtcccaatgtaagacacgtcagcccttgcagggttatgatcatccattgagatcatgtaggtggaatcctcctaacagatctttctgtgttcactcttgccaaaaaatgaatctgatcatgttgctgccccattgaaaccctccaacagtttcccaccaccaggaataagatcctaaccatggtccacaagccacacccgctggcggcccataaaactcaactcatggctgggcggggtggctcatgcctgtaatcccagcactttgaaaggccagggcg

SEQ ID NO: 6713 - DNA, 432 bp, Homo sapiens
  misc_feature 1..432: note = U/M: U (0.01:0.9) in Small Intes. + Colon Epithelium
  misc_feature 1..432: note = source = chr5:160109768-160110199; Gene: ATP10B (intron)
  source 1..432: mol_type = genomic DNA
cgggcgcggtggctcacgcctgtaatcccagcactttgggaggccgaggcgggcggatcacgaagtcaggagattgagaccatcctggctaacatggtgaaaccccgtctctactaaaaatacaaaaaattagccaggcgtgatggcgggcacctgtagtcccagctactcgggaggctgaggcaggagaatggcatgaacccgggaggtggagcttgcagtgagctgtgatggcgccactgcactccagcctgggcgacagaccaagactctgtcccccaaaaaaaaaaaaaaaaaaaaaaaagaagaagaagaaaagaaaaaaaagaaaaacaatgctttctcaaacaccgctttttcaaaggaaggcatcacaccccagcagtgatttcatcctctctttataattttcatattcaaaggcgaggaacg

SEQ ID NO: 6714 - DNA, 82 bp, Homo sapiens
  misc_feature 1..82: note = U/M: U (0.02:0.9) in Small Intes. + Colon Epithelium
  misc_feature 1..82: note = source = chr13:80016175-80016256; Gene: RBM26-AS1 (Intergenic)
  source 1..82: mol_type = genomic DNA
cgtcagccagggtctgcgggacaggcccggcactttgggaggccaaggcgggcggatcacttgagcccaggagttcaagacg

SEQ ID NO: 6715 - DNA, 275 bp, Homo sapiens
  misc_feature 1..275: note = U/M: U (0.04:0.92) in Small Intes. + Colon Epithelium
  misc_feature 1..275: note = source = chr6:134689461-134689735; Gene: LOC154092 (Intergenic)
  source 1..275: mol_type = genomic DNA
cggctcactgcaacctccgcctcctgggttcaaacaattctcctacctcagcctccagagtagctggaattacaggcacctgccaccacacccggctaagttaataactttcatgagagcgagagcaggcaaggatgagactggtttggcttttgcggacagtgactgcctcggataatgattccaccaggttccatttgatggagggcaggttcattgaacaccttcagctgcgaggagagctgtagtgagacctttgtgtctaatgactgccg

SEQ ID NO: 6716 - DNA, 77 bp, Homo sapiens
  misc_feature 1..77: note = U/M: U (0.02:0.89) in Small Intes. + Colon Epithelium
  misc_feature 1..77: note = source = chr15:83459321-83459397; Gene: FSD2 (intron)
  source 1..77: mol_type = genomic DNA
cgtgcgtgtgtgtgtgtgtgtgtttgagacagagtctcactctgtcgcctagggtggagtccagtggcgcgatctcg

SEQ ID NO: 6717 - DNA, 98 bp, Homo sapiens
  misc_feature 1..98: note = U/M: U (0.02:0.89) in Small Intes. + Colon Epithelium
  misc_feature 1..98: note = source = chr16:5113797-5113894; Gene: C16orf89 (intron)
  source 1..98: mol_type = genomic DNA
cgagttgtataattatatattataacataataacaataaacagaaagtgggctgggcacggtggctcacgcctgtaatcccagcactttgcgaggccg

SEQ ID NO: 6718 - DNA, 123 bp, Homo sapiens
  misc_feature 1..123: note = U/M: U (0.04:0.91) in Small Intes. + Colon Epithelium
  misc_feature 1..123: note = source = chr18:47040451-47040573; Gene: RPL17-C18orf32 (Intergenic)
  source 1..123: mol_type = genomic DNA
cgccttggcctcccgaaatgctgggattacaggtgtgagctactgtgcccagcctattttccgttgttataatttgtctgtaacttataaaatcgtaaaataggctgggtacagtggctcacg

SEQ ID NO: 6719 - DNA, 186 bp, Homo sapiens
  misc_feature 1..186: note = U/M: U (0.03:0.9) in Small Intes. + Colon Epithelium
  misc_feature 1..186: note = source = chr12:71547960-71548145; Gene: TSPAN8 (intron)
  source 1..186: mol_type = genomic DNA
cgtgcctgtaatcccagctactcgggaggctgaggcaggagaatcgctagaacctgggaagcagaggctgcagtgacccgagatcatgccgctgtattccagcctgggcaacagagcgagactctgtctcaaaataataataataataataataataataataataataataataatcagagctcg

SEQ ID NO: 6720 - DNA, 249 bp, Homo sapiens
  misc_feature 1..249: note = U/M: U (0.04:0.91) in Small Intes. + Colon Epithelium
  misc_feature 1..249: note = source = chr1:207120022-207120270; Gene: PIGR (promoter-TSS)
  source 1..249: mol_type = genomic DNA
cgtgaagatgctgttctgtcgctttctagctgcaagacctttggcaagtcaccttcctatttcttttcatctggaaaagagggatggtaataccaaatctacaggtagaggatatagcccggtattagctctaaaatacctggcccaatgcttgatttgaagttgacatcatctgatggggcacaggtggcaggagtggctgtcgtagtccttggtctcatatccccagttgctctggaatcccctccg

SEQ ID NO: 6721 - DNA, 280 bp, Homo sapiens
  misc_feature 1..280: note = U/M: U (0.05:0.92) in Small Intes. + Colon Epithelium
  misc_feature 1..280: note = source = chr16:81606499-81606778; Gene: CMIP (intron)
  source 1..280: mol_type = genomic DNA
cgtctcagacacacctccatgattggtccctgcctcacatcccagtttcttcaaatatcagcaagtttcacactgagagagaaatgtagataaccaataataaaatgaaatgacctctggtccctattgtcagagccataatagtgacattacaaaaatgcacctttagaccaggtgcagtagctcatgcctgtaatcccagcacttcgggaggccgaggcaggtggaacacttgagatcaggagttggagaccaggctggccaacacggtgaaaccccg

SEQ ID NO: 6722 - DNA, 305 bp, Homo sapiens
  misc_feature 1..305: note = U/M: U (0.01:0.88) in Small Intes. + Colon Epithelium
  misc_feature 1..305: note = source = chr12:94464329-94464633; Gene: PLXNC1 (Intergenic)
  source 1..305: mol_type = genomic DNA
cgtagttgtaaatcaagtgattgagaaaggcctccctaaggagatgtttgagcaaaggcctggaggagggagggagggagccatgtgggtttggtgtggcagagagggagtgttctgaatagcaggtgtaataagtgcaaaggtcctaaggtgggagtgtacctggggcatcagaaggctcgagcagagccaatcaggagacgatgagatcaaggaaggaaggagggtgcagttataggtgcacaagggcatcacaggccactagaggtgcttgacttttttttttttttttttttttcgagacg

SEQ ID NO: 6723 - DNA, 287 bp, Homo sapiens
  misc_feature 1..287: note = U/M: U (0.02:0.88) in Small Intes. + Colon Epithelium
  misc_feature 1..287: note = source = chr10:130400326-130400612; Gene: MKI67 (Intergenic)
  source 1..287: mol_type = genomic DNA
cgcacctggcttgatttttatcttttagctctctgttaattgcattggtattttgagaacaatatggtatggatctattcttttttttttaagtagtaagtaggattatggaaagcaaaagtgcctcaatatacaaagtacattatcctgcctagaggtggaagtccatcagtggacaatgagcaaatcaatcccaacagcctcaccatccacagacggaactggattctccaataacaagttggtaccgtccacctgccctgaggctggcgctgttctgtgtaccg

SEQ ID NO: 6724 - DNA, 305 bp, Homo sapiens
  misc_feature 1..305: note = U/M: U (0.07:0.93) in Small Intes. + Colon Epithelium
  misc_feature 1..305: note = source = chr2:122101306-122101610; Gene: CLASP1 (intron)
  source 1..305: mol_type = genomic DNA
cgaagatggatggtagtgatggttatacaacaatatgaaccacacacttaaaaatagttacaatgggtcggatgaggtggctcacacctgtaatcccagcattttgggaggtgggtggatcacttgaggtcgagagttcgagaccagcctgaccaacatggtgaaaccccatctcaactaaaaatacaaaaactagctgggcgtggtggcaggcgcctataatcccagctactcaggaggctgaagcaggacaatcgtttgaacctggtaggcggaggttgcagtgagccaagatcacgtcaccg

SEQ ID NO: 6725 - DNA, 394 bp, Homo sapiens
  misc_feature 1..394: note = U/M: U (0.02:0.88) in Small Intes. + Colon Epithelium
  misc_feature 1..394: note = source = chr12:14848427-14848820; Gene: GUCY2C (intron)
  source 1..394: mol_type = genomic DNA
cggggggctgaggcaggagaatggcgtgaacctgggaggcagagcttgcagtgagccgagatcgtgccactgcactccagcctgggtgacagagtgagactccatctcaaaaaaaaaaaaaaaaaaaagagtgaacaggccagagacaaatgtctttctctggataaaaggcccagagaaagatttggtgtctatgtgaaattgactgtcttaattcatcttcttgattagtatccctgtgaaatcttaggtctagaccaaatcttacctctgagtacagaaggaaacataatgccttcctggaaccgggcaataaactgagtttatttttatttattttctttttgaagagatggagtcttgctatgttgcccaggctggtcttgaactcccg

SEQ ID NO: 6726 - DNA, 397 bp, Homo sapiens
  misc_feature 1..397: note = U/M: U (0.07:0.93) in Small Intes. + Colon Epithelium
  misc_feature 1..397: note = source = chr17:2345980-2346376; Gene: METTL16 (intron)
  source 1..397: mol_type = genomic DNA
cgtcccgcaggtcctacaggtattaaagggtgtgaagaggtatagaacaactttttgccaataaatttcacaacttagatgaaacaaattgcttcaaaaacacaaactacccaagattactcaggaagaaatagataacttcaatagttcttttttttttttgagatagtcttgttctgttgcccaggctggagtgcagtggtaccatctgggctcaccgccacctccgccttccgggttgaggtaattctcccgcctcagcctcgcaagtagctgggattatatgtgtgtgccaccacgcccaactaatttttttgtttttgagacagagtaccactctgtcgcccaggctggagtgcagtggcgtgatctccactcactgcaacctccacttccg

SEQ ID NO: 6727 - DNA, 434 bp, Homo sapiens
  misc_feature 1..434: note = U/M: U (0.02:0.88) in Small Intes. + Colon Epithelium
  misc_feature 1..434: note = source = chr13:100339324-100339757; Gene: CLYBL (intron)
  source 1..434: mol_type = genomic DNA
cgctgcagctgtcttcatttgcaagactaaggtgtagctccaagaggctgtaggtctcagcatggagcactcctcctcaatctcaataggctggtgttgcggattaagatggccattgcaagccaggctcagaaattgcaagatgaggcaggtaacgatttcctgggttttatgtatcaggccttatgaggtatgaagcgggaaaccttttatatgcctgccttgaattagccataccttttacaatcagctctgttgaagagcagctgcctggactatctagcatacccatgggccaggcatgcctttggcacacacacaggtttgtaaagagcttgtgaatctataggatgatctcttggtgaggacagaagggacccatagctagtcagcatcggactgagggctggatccactttttcctgtaatgtgcg

SEQ ID NO: 6728 - DNA, 109 bp, Homo sapiens
  misc_feature 1..109: note = U/M: U (0.02:0.87) in Small Intes. + Colon Epithelium
  misc_feature 1..109: note = source = chr19:2305151-2305259; Gene: LINGO3 (intron)
  source 1..109: mol_type = genomic DNA
cgctcgaggcctcccggatctgtgcacctgccttctggggcgtggaaggcaggggacattgacctctccttggggtctgagatctgcaccaaccacggtgcaggcaccg

SEQ ID NO: 6729 - DNA, 169 bp, Homo sapiens
  misc_feature 1..169: note = U/M: U (0.01:0.86) in Small Intes. + Colon Epithelium
  misc_feature 1..169: note = source = chr4:27058679-27058847; Gene: STIM2 (Intergenic)
  source 1..169: mol_type = genomic DNA
cggaggaaacgcattccataagtgcaaagaattgttattatcgagcaattcagctagctcggaagcaataatgactttagggaggctgttgaacacatgctgtggtctttccaggctggaaaccaaaggttaaggtactatagggcactttatttcccgctccgccccg

SEQ ID NO: 6730 - DNA, 215 bp, Homo sapiens
  misc_feature 1..215: note = U/M: U (0.06:0.91) in Small Intes. + Colon Epithelium
  misc_feature 1..215: note = source = chr2:47587863-47588077; Gene: EPCAM (Intergenic)
  source 1..215: mol_type = genomic DNA
cgcccaggctggagtgcagtggtgtgatctcggctcactgcagcctctgcctcctgggttcaaacgattctcctgccccagcctcctgagtagctgggattacaggcacacgccaccatgccaggctaatttttatatttttagtagagacagggtttcaccatgttggccaggctggtctcgaactcccgacttcaggtgatccgcccccctcg

SEQ ID NO: 6731 - DNA, 267 bp, Homo sapiens
  misc_feature 1..267: note = U/M: U (0.1:0.95) in Small Intes. + Colon Epithelium
  misc_feature 1..267: note = source = chr10:12482435-12482701; Gene: CAMK1D (intron)
  source 1..267: mol_type = genomic DNA
cgccaccacacctggctaatttttgtacttttagtagagatggggtttcgccatgttggccaggctggtcttgaactcctgacctcaggtgatccgcccacctcggcctcccaaagtgctgggattacaggtgtgagccaccatgcccagccagatacctgtttttttgtttaatttggtgtgacggaagttgaactcagtggcacactttaaatgaatgcagtttattgtggataaattatacctcaataaagtatatgagatacg

SEQ ID NO: 6732 - DNA, 271 bp, Homo sapiens
  misc_feature 1..271: note = U/M: U (0.02:0.87) in Small Intes. + Colon Epithelium
  misc_feature 1..271: note = source = chr5:177768752-177769022; Gene: COL23A1 (intron)
  source 1..271: mol_type = genomic DNA
cgtttcagccacagtagtctctgttgctccagcagcagccggcaccccgcccgcctcaggacctgacccttggctcttcctgtttctggggcctgtcttcctccagacagcacctggcgagcccctcactgccttcacgtctttgctcacatgccaccttctcatggaaaactgccaccctcgctctcacccggcactggagattgccctcacctgcctaccatttttcgtaacacaccgaccttcggacctgtgaaaccctcatttaccg

SEQ ID NO: 6733 - DNA, 273 bp, Homo sapiens
  misc_feature 1..273: note = U/M: U (0.04:0.89) in Small Intes. + Colon Epithelium
  misc_feature 1..273: note = source = chr4:148614055-148614327; Gene: PRMT10 (Intergenic)
  source 1..273: mol_type = genomic DNA
cggagttgtgttttttcattgatgggtgtaacacagaggttataatcattggccacagactgcaacatataggctaaaatgtctgcgtgcaatacaatcagtaaaactttatgattctggccaggcacggtggctcatacctgtaatcctagcactttgggtggctgaggcggatggattgcctgagctcaggagttcgagaccagcctgggaaacatggcaaaaccccgtctttactgaaaatacaaaaaatcaacggggcacggtggggcg

SEQ ID NO: 6734 - DNA, 375 bp, Homo sapiens
  misc_feature 1..375: note = U/M: U (0.04:0.89) in Small Intes. + Colon Epithelium
  misc_feature 1..375: note = source = chr7:101344576-101344950; Gene: MYL10 (Intergenic)
  source 1..375: mol_type = genomic DNA
cgattctctctcctcggcctcccagagtgctgggattatggacacaagccaccacacctggctgggaataactcttttacaagaatctgtgtcaaagtccttcagcaaggctacactctaggaaaatgggatgctggctttggcaaggcgtgttttctgtttgggtcactcattagggaaatacctacagccattgtgggagaggggatgaaattaggactggaaatagccactgtctccctgctcatggaatcccagccagcctccccaatcaggaagggtgaagtccatgccgggagggcctgaccaacacctgaagtaccaggagagctggagccatagactcgtcaccctctgcggaaggacggggagccg

SEQ ID NO: 6735 - DNA, 280 bp, Homo sapiens
  misc_feature 1..280: note = U/M: U (0.09:0.93) in Small Intes. + Colon Epithelium
  misc_feature 1..280: note = source = chr2:169486471-169486750; Gene: CERS6 (intron)
  source 1..280: mol_type = genomic DNA
cgcccgccactaagcctgtctaattttttgtatttttattagagacgggatttcaccgtgttaaccaggatgatctcgatctcctgaccttgtgatccacctgcctcagcctcccaaagtgctgggattacaggtgtgagccaacacgcccagcccttaactattatactacaataagttaattgtcttttcttacaagataactttttttttttatgatatcaggaatgccatttagtgacatccagccaacttttaaaggcgtagctattcatactcg

SEQ ID NO: 6736 - DNA, 293 bp, Homo sapiens
  misc_feature 1..293: note = U/M: U (0.1:0.94) in Small Intes. + Colon Epithelium
  misc_feature 1..293: note = source = chr7:30296022-30296314; Gene: ZNRF2 (Intergenic)
  source 1..293: mol_type = genomic DNA
cgtgctgggcactgtcagcgtggagtcatgaatccggaagaagcagttgcactaactcaaaagtcctttagcatttacagacagttctgtttttatcgagtataagcatatcttccgaatgctgcctgcaaatgccaactctctggctggcgccatgcttctccaaggtaacgcgctctgtgtgcatggctgtcttcatggctgtttataggcagagaacaattctcattgatcaacacctgggctgaaccagttgttcgatatacaggcataccttgttttattgcatttcg

SEQ ID NO: 6737 - DNA, 449 bp, Homo sapiens
  misc_feature 1..449: note = U/M: U (0.08:0.92) in Small Intes. + Colon Epithelium
  misc_feature 1..449: note = source = chr17:4948401-4948849; Gene: SLC52A1 (Intergenic)
  source 1..449: mol_type = genomic DNA
cgtaaggtgacttatgtccttccccaagcatctcctggccaataaactgcccttccttaagatccagctcagcttctacctcctgagtgaaacctcttcatcttcctcaccaggtgtaggctgagggcttctcttccctcctctgaactcccatagaaaaaatttactggctgggcatggtggctcacacctgtaatcccagcactttgggaggctgaggtgggtggatcacctgagttcaggagtttgagaccagtatggccaacatggcgaaccctgtctctactaaaaaaaaatacaaaaattagccgggcatggtggcgtgcgcctgtaatctcagctactcaagaggctgaggcaggagaatcttttgaacctggaaggcggaggttgccgtgagccgaggtagtgcctctacactcctgcctgggtgacagagcaagatgccg

SEQ ID NO: 6738 - DNA, 94 bp, Homo sapiens
  misc_feature 1..94: note = U/M: U (0.01:0.84) in Small Intes. + Colon Epithelium
  misc_feature 1..94: note = source = chr7:98844527-98844620; Gene: MYH16 (Intergenic)
  source 1..94: mol_type = genomic DNA
cgatggggcaaaagcaatacacattcaatgcactcctcgatttatgatcaaacccatcgtatgttgaaaatatcataaatcgactttcaatacg

SEQ ID NO: 6739 - DNA, 199 bp, Homo sapiens
  misc_feature 1..199: note = U/M: U (0.1:0.93) in Small Intes. + Colon Epithelium
  misc_feature 1..199: note = source = chr10:13379633-13379831; Gene: SEPHS1 (intron)
  source 1..199: mol_type = genomic DNA
cgcacaagccaatcgctagttaggggggtggtgatttagcgccccttctgttctgggtgctctcattttaggagatgctggaaaacaatggactgtggttttagccatccctgccacctggtcatgtgggacctgggctgtggcttacctgcccagtctcaagagtattgctccagaggagaaaacggacagatgtgcg

SEQ ID NO: 6740 - DNA, 206 bp, Homo sapiens
  misc_feature 1..206: note = U/M: U (0.02:0.85) in Small Intes. + Colon Epithelium
  misc_feature 1..206: note = source = chr10:59934716-59934921; Gene: IPMK (Intergenic)
  source 1..206: mol_type = genomic DNA
cgctacgtaagtcgtggctattcgtgcacattaaactctagaatacaatgcactcaggctccacccagcaatcatcccttagtgtagttagactctggccttttctgctatggaggctccatgctgcagtgttccacacctctggataactgccattctcagcacagtcaatctgcacatcttctatgctgagcaggtgcacaccg

SEQ ID NO: 6741 - DNA, 264 bp, Homo sapiens
  misc_feature 1..264: note = U/M: U (0.04:0.87) in Small Intes. + Colon Epithelium
  misc_feature 1..264: note = source = chr1:95082540-95082803; Gene: F3 (Intergenic)
  source 1..264: mol_type = genomic DNA
cgtctgctgtttgctgagccccactcctccttcagagtcgctttcaggcctccatttctccatgaagcacttttaacactgatccacactaaaaataatgacaatagcatattagtaacaatagtaattaccatttattcaatgcctaccagttgctaggcactatgctaggagtttaacatataatatctatttcttaacaataatccgatcctaaaaacaatccaacaagctttatgcgtattacctctgatttttataacg

SEQ ID NO: 6742 - DNA, 422 bp, Homo sapiens
  misc_feature 1..422: note = U/M: U (0.08:0.91) in Small Intes. + Colon Epithelium
  misc_feature 1..422: note = source = chr16:58349438-58349859; Gene: PRSS54 (Intergenic)
  source 1..422: mol_type = genomic DNA
cggggtttcaccgtgttagccaggatggtctcgatctcctgaccttgtgatccacccgcctcagcctcccgaagtgctgggattacaggcgtgagccactgtgcctggccagcttaaaagattttaacaatgcttatgttttgtatagctaattgtttaactaaaaccaagattacagaagctttaagtctgtaattaaaaccaagattacagtagctcaatgcatagaagttaaagataagtgaattttataaccctgcctttggcattttgtttgttggcttttatattactttaaaaaatgtgagggttggctgggcgcggtgactcacgcctataatcccagcactttgggaggccgaggcaggcgtatcacgaggtcaggagatccagaccatcctggctaacaaggtgaaaccccg

SEQ ID NO: 6743 - DNA, 94 bp, Homo sapiens
  misc_feature 1..94: note = U/M: U (0.04:0.86) in Small Intes. + Colon Epithelium
  misc_feature 1..94: note = source = chr9:136837801-136837894; Gene: VAV2 (intron)
  source 1..94: mol_type = genomic DNA
cgaaggcagcggaggctcttgccactcactccagcgaggggaacctgactgcagacacccgcccaagccctcctcccacccactcctggaggcg

SEQ ID NO: 6744 - DNA, 318 bp, Homo sapiens
  misc_feature 1..318: note = U/M: U (0.06:0.88) in Small Intes. + Colon Epithelium
  misc_feature 1..318: note = source = chr17:79523884-79524201; Gene: NPLOC4 (TTS)
  source 1..318: mol_type = genomic DNA
cgcaggaaggacacaccaggaccaggcagttgcttcaggcgcttttattaggttccactgcagggctggggtcaatgtaatgcaaatccaagcccagtgatgcacacctgtgagccgaaacagagccgaagcaggagcacctgtgtcccaggagcagctggttggagggagccagggccaggccccacctcctctcgggaccaggagactggcagccgctgtgttcacctgggcaggtgtgcacccagtcacccccactggattatggtgctggtagcatgagagggtgtgtccacaccaagggcaggtgaagatgcg

SEQ ID NO: 6745 - DNA, 483 bp, Homo sapiens
  misc_feature 1..483: note = U/M: U (0.04:0.86) in Small Intes. + Colon Epithelium
  misc_feature 1..483: note = source = chr4:175330079-175330561; Gene: MIR4276 (Intergenic)
  source 1..483: mol_type = genomic DNA
cgaggctgcattgagccaagatcatgccacagcactctagcctaagctacagagctagatcctgttttttttttttttaaattgcccctggcaacacctgcctgccaggaaagcaccaacctaacctccaccctgcatggaggtataaaaggctggctcatagcctcaaggtcagtctacttctctggtagaatttcttttcccaagggatcagagtgaaagtaattttcagctgagacttcattcttgttttgtttcctttcccctgtatatccagctttcctcactcaattttttctgaagtacgccctcaacaagtcacataaaccagaatcttcatctcagtctttgtttctaggaaataagacccaatataagacggtaaagtccaatcatgcactaaagctgtgtagtccaatgtggtagtcacgagccacctgcagctattaaataaaataaactaagaattcagtttctcaaccg

SEQ ID NO: 6746 - DNA, 151 bp, Homo sapiens
  misc_feature 1..151: note = U/M: U (0.04:0.85) in Small Intes. + Colon Epithelium
  misc_feature 1..151: note = source = chr2:232768944-232769094; Gene: MIR1471 (Intergenic)
  source 1..151: mol_type = genomic DNA
cggcccagagctcttccttgccccagtcagggcccagccgtcactagcaggaggccgtctccagggcgttggccagagcagagttctctcacctccccagcctcggcggaggaggagaaagtggctgtggcctcctgtggaaggggtggcg

SEQ ID NO: 6747 - DNA, 155 bp, Homo sapiens
  misc_feature 1..155: note = U/M: U (0.08:0.89) in Small Intes. + Colon Epithelium
  misc_feature 1..155: note = source = chr21:43521772-43521926; Gene: C21orf128 (TTS)
  source 1..155: mol_type = genomic DNA
cgcaacctcccttgtaagtaagcaaccctaccattttgactggcagagtacgttcttgagaagttggactttcagagctaaattctggaacctcccgggcaggttggaacccattggtcaccctgatgttgggggcctgagtaagggcctcgtcg

SEQ ID NO: 6748 - DNA, 260 bp, Homo sapiens
  misc_feature 1..260: note = U/M: U (0.1:0.91) in Small Intes. + Colon Epithelium
  misc_feature 1..260: note = source = chr20:52455348-52455607; Gene: SUMO1P1 (Intergenic)
  source 1..260: mol_type = genomic DNA
cggtggatcacctgagatcaggagttcgagaccagcctggctaacatggtgaaactccatctccactaaaaaaaaatacaaaaattagccaggcatggtggtgggcacctgtaatcccagctacttggggggccgaggcaggagaatcacttgaacccgggaggcaaaagttgcagtgagctgagatcatgtcactgcactccagcctgggcaacagatggagactgcgccttaaaaaaaaaaggggggggccgggcgcg

SEQ ID NO: 6749 - DNA, 476 bp, Homo sapiens
  misc_feature 1..476: note = U/M: U (0.1:0.91) in Small Intes. + Colon Epithelium
  misc_feature 1..476: note = source = chr19:47718897-47719372; Gene: MIR3190 (Intergenic)
  source 1..476: mol_type = genomic DNA
cgtgccactgcactccatcctgggcaaaaagagcgaaattctgtctcaaaaaaaaaaaaaagaacctccatctccatgcttaaatacttgtgagcagggcaaaggccatgcagagagtgttcacacccagaccaacgccctgcttcgccttcactgcagtgcatgccatccctttggtagaggatgagacaccttcccataactggctcccctttctcataatatgtcttagaattattaacatggttgaatttaggtctaccatttgctttccatttgtcccacttttgttcccctgtttctcctttcctgccttctcttgaagtatttgattaatttttttttttttttttttttttgagacagagtctcactctgtcacccaggctagagtgcagtagcgcgatctcggctcactgcaacctccacctcccagcaagtagctgaggttataggctcccaccaccatgccagcg

SEQ ID NO: 6750 - DNA, 51 bp, Homo sapiens
  misc_feature 1..51: note = U/M: U (0.08:0.88) in Small Intes. + Colon Epithelium
  misc_feature 1..51: note = source = chr6:150253324-150253374; Gene: RAET1G (Intergenic)
  source 1..51: mol_type = genomic DNA
cgggcgcggtggctcacgcctgtactaccagcactttgggaggccaaggcg

SEQ ID NO: 6751 - DNA, 55 bp, Homo sapiens
  misc_feature 1..55: note = U/M: U (0.12:0.92) in Small Intes. + Colon Epithelium
  misc_feature 1..55: note = source = chr1:26503371-26503425; Gene: CNKSR1 (promoter-TSS)
  source 1..55: mol_type = genomic DNA
cgcccacctcggcctcccaaagtgctgggattacaggcgtgagccaccgcgcccg

SEQ ID NO: 6752 - DNA, 274 bp, Homo sapiens
  misc_feature 1..274: note = U/M: U (0.02:0.82) in Small Intes. + Colon Epithelium
  misc_feature 1..274: note = source = chr17:47060475-47060748; Gene: IGF2BP1,GIP (Intergenic,Intergenic)
  source 1..274: mol_type = genomic DNA
cgaactcccggcctcaggtgatcccacctcaggtgattcgcctgccttggcctcccaaagtgctgggattacaggcgtgaaccactgcacccggtgattgagttaatttttatacataaggtgaggcacgaacagaagatttttttttttttgcatatctatgtttaattgttttagcactatttgttgaaaagacgctttgtccattgagttgtataactcaataactttatggcttgtataaaataagttgtgatacatgtgtgtttcatcg

SEQ ID NO: 6753 - DNA, 275 bp, Homo sapiens
  misc_feature 1..275: note = U/M: U (0.12:0.92) in Small Intes. + Colon Epithelium
  misc_feature 1..275: note = source = chr16:70318163-70318437; Gene: AARS (intron)
  source 1..275: mol_type = genomic DNA
cgcgccactgcactccagcctgggtgacagagcaagactccgtctcaaaaaaaacaaaaatggccgggcgcggtggctcacgcctgtaatcccagcactttgagaggccgaggcaggcggatcacgaggtcaggagatcaagactatcttggctaacatggtgaaaccccgtctctactaaaaatacaaaaaataatccgggcatggtggcaggcgcctgtagtcccagttactcggaaagctgaggcaggagaatggcgtgaacccaggaggcg

SEQ ID NO: 6754 - DNA, 313 bp, Homo sapiens
  misc_feature 1..313: note = U/M: U (0.06:0.86) in Small Intes. + Colon Epithelium
  misc_feature 1..313: note = source = chr7:6406310-6406622; Gene: RAC1 (Intergenic)
  source 1..313: mol_type = genomic DNA
cgagattgcaccacttacactccagcctgggacagagcaaacctctgtctcaaaaaaaaaaaaaaaaaaaaaaggatagttagccaggtgtagtggtgcacacctgtaatcccagttactcaggaggctgaggcaggagaattgctcgaccccaggagacagagattgcagtgtgtggtgattgctccactgcacttcagcctgaacgacagagggactccatctcaaaaaaaaaaaaaaaaaacttgtataataaaatgttagggccgggcgtggtggctcatgcctgtaatcccagcactttgggagaccg

SEQ ID NO: 6755 - DNA, 426 bp, Homo sapiens
  misc_feature 1..426: note = U/M: U (0.12:0.92) in Small Intes. + Colon Epithelium
  misc_feature 1..426: note = source = chr15:62870563-62870988; Gene: MGC15885 (Intergenic)
  source 1..426: mol_type = genomic DNA
cgagaccagcctggccaacatggtgaaaccccgtctctactaaaaatacaaaaattaaccaggtgtggtggtgcatgactgtaatcccagcttctcgggaggctgaggcaggagaatcacttgaacccgggaggtggaggttgcagtgagtgagattgcgccactgcaccccagcctgggtgacagaacaagactccgtctcaaaacaaacaaacaaaaacccccatctcctgcatattccacttcatgaaaatgctttaaagaaatacaggaaaggtgtgaatccccatcctgctcacagagattttattccaggtagagagctgagaggccgcatgtggggaggggggtaaagtccacatttattgcaggtgtgctgtgctcgtgtgtccctcgcatcagctcgtgagggaggccctggcatcg

SEQ ID NO: 6756 - DNA, 312 bp, Homo sapiens
  misc_feature 1..312: note = U/M: U (0.12:0.9) in Small Intes. + Colon Epithelium
  misc_feature 1..312: note = source = chr10:30847753-30848064; Gene: LYZL2 (Intergenic)
  source 1..312: mol_type = genomic DNA
cggagttttgcttttgttgcccaggctggagtgcaattgtgcgatcttggctcacagcaacctctgtctccagggttcaagcaattctcctgcctcagcctcccgagtagctgggattataggcgtgtgccgccacacccggctaattttgtatttttttttttttattagagacagggtttctgcacgttggtcaggctggtctcgaactcctgacctctcaggtgatccacctgcctctgcctcccaatgtgttgggattacgggcgtgagccaccgagcccggcccatcaggcagttgttaaactatcg

SEQ ID NO: 6757 - DNA, 442 bp, Homo sapiens
  misc_feature 1..442: note = U/M: U (0.14:0.91) in Small Intes. + Colon Epithelium
  misc_feature 1..442: note = source = chr12:122590823-122591264; Gene: MLXIP (intron)
  source 1..442: mol_type = genomic DNA
cgtccttggagactccgctcaggcatcctaattaaggaaaacaccactgggtgcccctccattgcacttccatacactccacacatgcctttgctcactcaaaggaagacctttctgtcttctgcattagctcgtgaggtcctgagggcagagccagggatggcattgtcactgtgttgtcactgtctgtgcagagcctgacacatcgggcttttggtaagtgttgctgggatgttccactccctggcctgcagagggtttctgtatggtgtggatgcatttgattcctggtggtgaaagcaagatggaatcgcaggttcttttttttttttttttttttttttgagatggagtctcactctgtcatccaggctggagtgcagtggcgcgatctcggctcactgcaacctccgcctcccgggttcaagtgatcctcctgccg

SEQ ID NO: 6758 - DNA, 95 bp, Homo sapiens
  misc_feature 1..95: note = U/M: U (0.18:0.93) in Small Intes. + Colon Epithelium
  misc_feature 1..95: note = source = chr11:118724393-118724487; Gene: CXCR5 (Intergenic)
  source 1..95: mol_type = genomic DNA
cgatttcaccatgttggccaggtcgaactcctgacctcgtgatccgcccgcctcggcttcccaaagtcctgggattacaggcgtgagccaccgcg

SEQ ID NO: 6759 - DNA, 376 bp, Homo sapiens
  misc_feature 1..376: note = U/M: U (0.19:0.94) in Small Intes. + Colon Epithelium
  misc_feature 1..376: note = source = chr2:232532581-232532956; Gene: PTMA (Intergenic)
  source 1..376: mol_type = genomic DNA
cgattgtcctgcctcagcttcccaagtagctgggattataagcacctgccaccatacctggagaattttttttgttttgttttgttttttgagacacacctggctaatttttgtttttgttgttgtttgttttttttttttgagacagagtttccctcttgttgcccaggctggagtgcaacggtgcaatctcggctcactgcaacctccgcttcccaggttcaagcaattctcctgcctcagcctcccaagtagctgggattacaggcacgtgccaccacacccagctaattttgtatttttagtagagatggggtttctccatgttggtcaggctggtctcgaccacctgacttcaggtgatccgcctgcctcg

SEQ ID NO: 6760 - DNA, 365 bp, Homo sapiens
  misc_feature 1..365: note = U/M: U (0.26:0.95) in Small Intes. + Colon Epithelium
  misc_feature 1..365: note = source = chr22:46587735-46588099; Gene: PPARA (intron)
  source 1..365: mol_type = genomic DNA
cgggcagatcacgaggtcaagagatcaagaccatcctggccaacatggtgaaaccttgtctctactaaaaatacaaaagtagccgggcgtggtggcgcacgcccgtagtcccagctactcaggaggctgaggcaggagaatcacttgaacccgtgaaacggaagttgcggtgagccgagatcacgccactgtactccagcctggtgacagagtgagactccatctcaaaaaaaagagaaagaaagaaatagacattgaacacctgctacacagcagggattgtgctagaagtatggatgcaaagattaggtgaatatgttccctagcctcacaaagcatacagtctagtaggagagacagacacg

SEQ ID NO: 6761 - DNA, 52 bp, Homo sapiens
  misc_feature 1..52: note = U/M: U (0.01:0.95) in Small Intes. + Colon Epithelium
  misc_feature 1..52: note = source = chr10:99481763-99481814; Gene: MARVELD1 (Intergenic)
  source 1..52: mol_type = genomic DNA
cgccgacatggcctcccaaagtgttgggattacagccatgagcaaccgcgcc

SEQ ID NO: 6762 - DNA, 93 bp, Homo sapiens
  misc_feature 1..93: note = U/M: U (0.01:0.94) in Small Intes. + Colon Epithelium
  misc_feature 1..93: note = source = chr19:2278616-2278708; Gene: C19orf35 (exon)
  source 1..93: mol_type = genomic DNA
cgcgcgcaccacgcggtaatacagggcgtccccgctctctgcgcagggtgagctgtctaggaggcggaagctgtggccggggtggcagggccc

SEQ ID NO: 6763 - DNA, 185 bp, Homo sapiens
  misc_feature 1..185: note = U/M: U (0.01:0.93) in Small Intes. + Colon Epithelium
  misc_feature 1..185: note = source = chr14:55668352-55668536; Gene: DLGAP5 (Intergenic)
  source 1..185: mol_type = genomic DNA
cgtggtagtgggcacctatagtcccagctactcgggaggcggagacaggagaactgcttgaacccgggcagcggagggtgccgtgagccgagatcgtgccattgcactccagcctgggtgacaaaagcgagactccatctcaaaaaaaaaaaaaaaagtgcggctttctgctccaaaagcaaagc

SEQ ID NO: 6764 - DNA, 411 bp, Homo sapiens
  misc_feature 1..411: note = U/M: U (0.01:0.93) in Small Intes. + Colon Epithelium
  misc_feature 1..411: note = source = chr19:39305863-39306273; Gene: ECH1 (TTS,exon)
  source 1..411: mol_type = genomic DNA
cgacttttgctcactccctccgccccggaattccttgtgcccctcgcctgcccgctgccagtctgaatggccatcacctccatgccacccattcccatgcatccaacctctagccccagccttcaggactgcagtctctggagcccctaggtgcatcccagcccctcccacctctcctctatccaagaagggcaccaggttctttactttgctttattgtttgtggggtgaagataaggccttgggcttgagaaactcattgtcataaagttataaactgggaaactgggtcagaaggcatagaaacaactgtcatcgcccatcctccctttctgtggatgaggcgggacaaggccggccccctggctggggcctgggacgcgagggctctcagagcttggagaaggtgac

SEQ ID NO: 6765 - DNA, 217 bp, Homo sapiens
  misc_feature 1..217: note = U/M: U (0.02:0.94) in Small Intes. + Colon Epithelium
  misc_feature 1..217: note = source = chr9:139497804-139498020; Gene: EGFL7 (Intergenic)
  source 1..217: mol_type = genomic DNA
cgcttctagtcatggcttttattgtccccagtaaaagagccctggacttcgggctctgtcaggtacttggggctgcgagttgtgagttggggaaacaggccgccgggaaccaaatatgctcccaggctccacaaccaatgagggtgtggctgggatttgagcccacatgccaggggtcctggtggggtccagggcctggctggggctgggaggcgcc

SEQ ID NO: 6766 - DNA, 405 bp, Homo sapiens
  misc_feature 1..405: note = U/M: U (0.03:0.95) in Small Intes. + Colon Epithelium
  misc_feature 1..405: note = source = chr6:2309359-2309763; Gene: LOC100508120 (intron)
  source 1..405: mol_type = genomic DNA
cgcttgctgttttccacaccagaagtcactttatttgaataccatactttttttttcctgctagcatactggcaaagactattggaaaaaaaaaaagtgtgtaaaatttgattttattgctaccctaaggtggcataattagccataaggtggaaatgtgagaaatctcccactttgcaaaaggatgtcagcgtatcggacctctgggctctatggaaattggtaataaattcttagaactttgtacctaatgcagagaattgtttagttagttgctatcataaaaacagagaggcatgcccttctttttttgttcttttttatttttttttttttaagatagaattttgctcttgttgcccaggctggagtgcagtgacgtgatcttggctcactgtaacctcc

SEQ ID NO: 6767 - DNA, 460 bp, Homo sapiens
  misc_feature 1..460: note = U/M: U (0.02:0.93) in Small Intes. + Colon Epithelium
  misc_feature 1..460: note = source = chr3:43655182-43655641; Gene: ANO10 (intron)
  source 1..460: mol_type = genomic DNA
cgaatattaacctactagtagaatacagaggctgagttcatcaccttcaaaatggaaatatcaaatacaataaacacttatcatgtgcttactatgagccaggccatgagagtcaaaaggtacaaaggtaaataaagtctacaccttgcttttgaggagcccttagtctagtagcagaagcaagcatgcatcaaattattctaacacatgggctaagtacagtagcaggaacccaaaaagtaggtgtagcctcaggagagggcactgtctgggaagggatgatgggagccacacagcgttcaacttagactagatacacagaaaaccccaaggtttccaatcttggatatgggaagaataactatgcgtgaaaaaaatagcaaagttggaaagaatgtctagtttaagggaacaataaagtgttccgcagagtatctggggacacgcatcaaaggtcaac

SEQ ID NO: 6768 - DNA, 258 bp, Homo sapiens
  misc_feature 1..258: note = U/M: U (0.06:0.96) in Small Intes. + Colon Epithelium
  misc_feature 1..258: note = source = chr17:80535107-80535364; Gene: FOXK2 (intron)
  source 1..258: mol_type = genomic DNA
cgtgtcttcaaactccaggtagtacttgtccatgtaatttctctgtaataactggaactcgttatccatgataacgttctctaaatatccaaccacaacagcaaattcatcagaggtggaggagaaagacagcacaaagctctcttcttctaaggtgtccatcactgcagccccgagcaggctcctaccccgcctgtggcccaacctgcatgcagggcgtggcgggcggccgggttaaggtctcgcagccaaagctgc

SEQ ID NO: 6769 - DNA, 436 bp, Homo sapiens
  misc_feature 1..436: note = U/M: U (0.05:0.95) in Small Intes. + Colon Epithelium
  misc_feature 1..436: note = source = chr17:80535398-80535833; Gene: FOXK2 (intron)
  source 1..436: mol_type = genomic DNA
cgtgccaggcccagccctgggttagggccccgccgggccctctgtgcataccgccgacactgcgggccaaggtctcggtgactccaaaatgatttttatggttttatgattttacttcacccagaattgagataattgttgtgactatgagaagtttgaaaggacgggcctctcagcctccaaagggactagagctggttccttttatttatttttgttttatttatttttttggggacagagtcttactctgttgcccaggctggagtgcagtggcgcgatctcagctcactgcaacctttgcctcctgggttcaagtggttctccattctcagcctcctgaggagctgggactacaggtgcatgccaccatgcccggctaatttttgtgtttttactagggatgggattttgccatgttggccaggctggtctc

SEQ ID NO: 6770 - DNA, 183 bp, Homo sapiens
  misc_feature 1..183: note = U/M: U (0.04:0.93) in Small Intes. + Colon Epithelium
  misc_feature 1..183: note = source = chr20:57009379-57009561; Gene: VAPB (intron)
  source 1..183: mol_type = genomic DNA
cggtaggcttgcagtagtgaaagatccatggactaggaatcagaagactgggtcctcggccttattcccagctctgtcatgcgtgattttgtggctcttaggttggtgacctgcaaaatggagatgttggtcatccttgcttacttcaccaggggcgtccatcctaagacataagagaatgcc

SEQ ID NO: 6771 - DNA, 204 bp, Homo sapiens
  misc_feature 1..204: note = U/M: U (0.07:0.96) in Small Intes. + Colon Epithelium
  misc_feature 1..204: note = source = chr10:1166110-1166313; Gene: WDR37 (intron)
  source 1..204: mol_type = genomic DNA
cgtgggtgatgagaaaggccgggatggagcttcggagaccccgagtgtgcatttgggctgcctggctgtgaagagaagacctgtttaatgtgttaggagttggatttcatgcagatagcttggaagttgcaggaagggctctgatgactccaaacacaacacagctaccccatgtcttcccttgcgctatgaagcgccgcctcc

SEQ ID NO: 6772 - DNA, 472 bp, Homo sapiens
  misc_feature 1..472: note = U/M: U (0.06:0.94) in Small Intes. + Colon Epithelium
  misc_feature 1..472: note = source = chr11:61148275-61148746; Gene: TMEM216 (Intergenic)
  source 1..472: mol_type = genomic DNA
cggcctctacataaaaattttaaaaattagctgggtgtggtggtgtgtgcatttgtagtcccaactactcgggaggctgaggtgggaggattgcttgtgtccaggaggttgaggctgcagcgagctgtgattgcaccactgtaccccagcttaggcggcagagcaaaaccttgtctcgacagaaaaaaaaaaattaaaccaagctaattaagaaaggaggtggttataaaattgttcgtcaggaattatcattgatttgcagaaggaacattggttcgtgattggctataccttgttgaactatagggtttatggtattttatggcagcttggtgtcagttagtctagagtccacatagcaagtggcttcaagaggtaattatttttctcaagagggaatgagacgtgaccgtggctatgtttttaaacatctttctgagcctgacaatttatttatttatttattttaaac

SEQ ID NO: 6773 - DNA, 77 bp, Homo sapiens
  misc_feature 1..77: note = U/M: U (0.06:0.93) in Small Intes. + Colon Epithelium
  misc_feature 1..77: note = source = chr1:53164855-53164931; Gene: SELRC1 (promoter-TSS)
  source 1..77: mol_type = genomic DNA
cgggcgcggtggttcacgcctgtaatcccagcactttgggaggccgaggtgggtggatcacctgaggtcaagagttc

SEQ ID NO: 6774 - DNA, 221 bp, Homo sapiens
  misc_feature 1..221: note = U/M: U (0.06:0.93) in Small Intes. + Colon Epithelium
  misc_feature 1..221: note = source = chr22:31062373-31062593; Gene: DUSP18 (intron)
  source 1..221: mol_type = genomic DNA
cgaggcgggcagatcacctgaggtcaggagttcaagaccagcctgaccaacatggtgaaacccccgtctctactaaaaatacaaaaattagccaggcgtggtggcatgggcctgtagtcccagctactcaggaggctgagacgggagaattgcttgaacccgggaggcggaggctgcagtgagccaagatcgtgccactgcactccagcctgggagacagc

SEQ ID NO: 6775 - DNA, 260 bp, Homo sapiens
  misc_feature 1..260: note = U/M: U (0.04:0.9) in Small Intes. + Colon Epithelium
  misc_feature 1..260: note = source = chr22:31076221-31076480; Gene: DUSP18 (Intergenic)
  source 1..260: mol_type = genomic DNA
cgaacagctgggactacaggcacgtgccaccacacccagctaacttttgtatttttagtagagacagggtttcaccatgttggccaggatggtctcaatctcttgacctcgtgatctgcccactttggcctcccaaactgctgggattacaggtgtgagccaccgcacccagccgagatgaggttttattatgttggccaggctggtcttaaactcctgacctcaggtgatccacccaccttggcttcttgaagtgctgc

SEQ ID NO: 6776 - DNA, 95 bp, Homo sapiens
  misc_feature 1..95: note = U/M: U (0.09:0.93) in Small Intes. + Colon Epithelium
  misc_feature 1..95: note = source = chr11:6398940-6399034; Gene: SMPD1 (Intergenic)
  source 1..95: mol_type = genomic DNA
cgtgttagccaggatggtctcgatcccctgacatcgtgatccacccgccttggcctcccaaagcgctgggattacaggcgtgagccaccgcgccc

SEQ ID NO: 6777 - DNA, 178 bp, Homo sapiens
  misc_feature 1..178: note = U/M: U (0.09:0.92) in Small Intes. + Colon Epithelium
  misc_feature 1..178: note = source = chr14:24611688-24611865; Gene: EMC9 (promoter-TSS)
  source 1..178: mol_type = genomic DNA
cgcctgaggtcaggagttcgagaccagcctggccaacatggcgaaaccccgtctctattaaaaatacaaaaaaattagccaggtgtggtggcacatgcctgtaattccagctactcgggaggctgaggcaggagaattgcttgaacccgggagacggaggtagcagtaagctgagatc

SEQ ID NO: 6778 - DNA, 205 bp, Homo sapiens
  misc_feature 1..205: note = U/M: U (0.03:0.95) in Small Intes. + Colon Epithelium
  misc_feature 1..205: note = source = chr1:78458500-78458704; Gene: DNAJB4 (Intergenic)
  source 1..205: mol_type = genomic DNA
cgggttcaagcgattatcctgcttcagcctcccgagtagctggaattacaggcatgtgctaccacacctggctaatttttgtatttttagtagagacagggtttaaccatgttggccaggctggtctcgaactcctgacctgaggtgatctgtccgcctcagcctcccaaagtgctaggattataggcttgagccaccgcgcccg

SEQ ID NO: 6779 - DNA, 175 bp, Homo sapiens
  misc_feature 1..175: note = U/M: U (0.01:0.92) in Small Intes. + Colon Epithelium
  misc_feature 1..175: note = source = chr2:8849893-8850067; Gene: ID2 (Intergenic)
  source 1..175: mol_type = genomic DNA
cgtccccgcctttcctatgccctttgtccttgtaggttgacgcctgtgtcagcagagagaggaaagagacgcaggcgatcattctcccgtccttacgtggcagacagggttatttgcgtagattgaccgagatgagtgtcctgcactctgaagaaccttggtggctcctccttcg

SEQ ID NO: 6780 - DNA, 182 bp, Homo sapiens
  misc_feature 1..182: note = U/M: U (0.02:0.92) in Small Intes. + Colon Epithelium
  misc_feature 1..182: note = source = chr2:47587206-47587387; Gene: EPCAM (Intergenic)
  source 1..182: mol_type = genomic DNA
cggctaattttttttgtatttttagtagagacggggttttgccatgttggccaggctggtcaagtgatccaactgtctaggtctcccaaagtgctgggattacaggcatgagccaccacgccaggcccgtttagttcattcttactacacaccttgattttccatgaacatctcaggaatcg

SEQ ID NO: 6781 - DNA, 259 bp, Homo sapiens
  misc_feature 1..259: note = U/M: U (0.03:0.93) in Small Intes. + Colon Epithelium
  misc_feature 1..259: note = source = chr22:20857395-20857653; Gene: MED15 (Intergenic)
  source 1..259: mol_type = genomic DNA
cgggcggatcacctgaggtcaggagtttaagaccagcctggccaatatggtgaaacctggtctctactaaaaataaaaagtaaggccaggtgtggtggcgggacctacctgtaatcccagctacttgggaggctggggcaggagaatcgcttgaacctgggaggtggaggttgcagtgagccgagatcgtgccactgcactccagcctgggagacagtgcgagactccatctcaaaaaaaaaaaaaaaaattgggcacg

SEQ ID NO: 6782 - DNA, 375 bp, Homo sapiens
  misc_feature 1..375: note = U/M: U (0.01:0.91) in Small Intes. + Colon Epithelium
  misc_feature 1..375: note = source = chr15:40645207-40645581; Gene: PHGR1 (intron)
  source 1..375: mol_type = genomic DNA
cgctgtgtccatttaacccccatgcctggcacctacagtgccagctctatattggggccaagctaagccggagggagcagttttttccctttcttcctttgaagggtgtgtgtgtgtgtgtgtgtgtgtgtgtgtgtgtgtgcgcgcgcgcgcgcatccgtgggagggagaaaggaaagactgcaatttagattacagtaaattaaaagttaccttttgaacacaggtattccctgctcttactccaaaaagatggacccaggtaagcactgtggctgagaggctgggaattggaagaagggagagagcaggagagcggtaaaggcagggactatcagtcagccataactagtgcgtgccaaaaatgtacgtgcg

SEQ ID NO: 6783 - DNA, 109 bp, Homo sapiens
  misc_feature 1..109: note = U/M: U (0.01:0.9) in Small Intes. + Colon Epithelium
  misc_feature 1..109: note = source = chr2:97427379-97427487; Gene: CNNM4 (exon)
  source 1..109: mol_type = genomic DNA
cgcatcgtgcagaactgtggcaccgagaaggagaggcgctatgcccgcaagattgagcccatccggcgcaagggcaactaccttctctgctcgttgctcctagggaacg

SEQ ID NO: 6784 - DNA, 303 bp, Homo sapiens
  misc_feature 1..303: note = U/M: U (0.01:0.9) in Small Intes. + Colon Epithelium
  misc_feature 1..303: note = source = chr2:106959820-106960122; Gene: PLGLA (Intergenic)
  source 1..303: mol_type = genomic DNA
cgtgggcatgtgatctgtgagccgtggtccccacggaagcggtgagaacgcacctggccggctcagccacacggcacggtggcctaggccctgctgcgggctctggatccagcggtcacggtttcactgagagggcgcctcccaggggctgctccggcccagggcagggcattgcaggggtgatgggacagccctgcttttgagaggcgcggcactctgccaagggccacccctggtagccctgcccagcctccctgggagcacacagctgtctaggatgcttctgggcatcctttccctccg

SEQ ID NO: 6785 - DNA, 118 bp, Homo sapiens
  misc_feature 1..118: note = U/M: U (0.03:0.91) in Small Intes. + Colon Epithelium
  misc_feature 1..118: note = source = chr5:151251315-151251432; Gene: GLRA1 (intron)
  source 1..118: mol_type = genomic DNA
cggggtttcactgtgttaaccaggatggtctcaacctcctgacttcgtgatctgcctgcctcggcctcccaaagtgccgggattacaggcgtgaaccaccgcgcccggccgtgagacg

SEQ ID NO: 6786 - DNA, 320 bp, Homo sapiens
  misc_feature 1..320: note = U/M: U (0.06:0.94) in Small Intes. + Colon Epithelium
  misc_feature 1..320: note = source = chr17:17466693-17467012; Gene: PEMT (intron)
  source 1..320: mol_type = genomic DNA
cgcatccgcaggggccccctctcagccccacctcgcagggaggtaccatctctgagttccacggaaatgcgaagggggaagccccaggattctgcagcaagaagcacagggtgccccttaggaagaaggggcagttttggcctgagatagaggaaggccagaaaggcgactaaaaatttcatgagcaaagatcattaatagcaatagcaacatcgcccatccacgctggctttattgctttattacaaccatgctgctaccgtaagcgggtggcaggcaaagcgacaggtgtactgggaccgctgtgtgcctggagcccg

SEQ ID NO: 6787 - DNA, 461 bp, Homo sapiens
  misc_feature 1..461: note = U/M: U (0.02:0.9) in Small Intes. + Colon Epithelium
  misc_feature 1..461: note = source = chr14:73238101-73238561; Gene: DPF3 (intron)
  source 1..461: mol_type = genomic DNA
cggcttgtaaccaacacccaaaggtaaaagatgaagattgctgtcatgtcctcagtcttgccttctttgggataaacacctttagctctttcactccccaccccaccccacccctgccacatggcttcaatgccccacaccatccttgtcacattccttgaaacacctgccaggagccataaaagtagctgagcttctttaaggtatctcagaggcccatgtgcagcttgccccaccccgatcctacccaggctgcctggtttcccagacaagctgcggtcctcctccctccaggctgggagcctgcacatgcgcatgtcccaggagtggcgcagctcacctgggcctcggtgcctcttctccatccagatgtagcagttgttctgggccaccccagtctgtgagtccaggaagggaagacgcacgctgcgctctgcacacagccgtgagttgtaactccg

SEQ ID NO: 6788 - DNA, 58 bp, Homo sapiens
  misc_feature 1..58: note = U/M: U (0.04:0.91) in Small Intes. + Colon Epithelium
  misc_feature 1..58: note = source = chr20:42852813-42852870; Gene: LOC100505783 (intron)
  source 1..58: mol_type = genomic DNA
cggctcactgcaatccccgcctccagggttcaagcgagtctcctgcctcagcgccccg

SEQ ID NO: 6789 - DNA, 166 bp, Homo sapiens
  misc_feature 1..166: note = U/M: U (0.03:0.9) in Small Intes. + Colon Epithelium
  misc_feature 1..166: note = source = chr2:28718664-28718829; Gene: PLB1 (promoter-TSS)
  source 1..166: mol_type = genomic DNA
cgaacaccggcaatttctgggcacccaccatcatggaaggctgtatggaggcagctatgcggccctggtctgtcagtgtctatgactagaacatgctacccatcattgactcatctgccttaagaactcttccgcctaagtgttaatatttatcatttacagcccg

SEQ ID NO: 6790 - DNA, 325 bp, Homo sapiens
  misc_feature 1..325: note = U/M: U (0.03:0.9) in Small Intes. + Colon Epithelium
  misc_feature 1..325: note = source = chr9:112069228-112069552; Gene: EPB41L4B (intron)
  source 1..325: mol_type = genomic DNA
cgcccatacatttgaccattttgtattcctcccacagggccttacagacactagatgtgctgcagttgtttttttttttttttttttcttcaagaaataaatgaaatagctgaaataaaacagttcttgtcagtaaatggatgcaactgtaactatctggaaaacttacctatgtggaagagctcattccctgaagcgagttaataaacgacatgttacagtaattctattatagtacatacaatcctttcccttttaaaagacagcattaaatttttcctttttttttttccaggagcgtctttaattaagaggaacttcatcg

SEQ ID NO: 6791 - DNA, 399 bp, Homo sapiens
  misc_feature 1..399: note = U/M: U (0.02:0.89) in Small Intes. + Colon Epithelium
  misc_feature 1..399: note = source = chr17:73613196-73613594; Gene: MYO15B (intron)
  source 1..399: mol_type = genomic DNA
cgccagctgtggctcctcgacccaaggccccgctacagcttgggccctctagctccatcaaggaaaagcaggggccccttctggacctgtttggccagaagctgcctattgcccacacacccccacctccaccagcgccaccactgcctctgcccgaggacccagggaccctttcagcagagcgtcgttgtaaggaaccacatttctcctgcgccgtgggcttcactggggcagaggcagggttcgcacagactctcggtgcccagggctgaaggcatttctgcgtggctgaggccagctgttcgggcttctggactttggagccatacgtagctggggagtcccagcttccgcgttcccacccagggcagggcctgggcatctttggggctgtcatcg

SEQ ID NO: 6792 - DNA, 495 bp, Homo sapiens
  misc_feature 1..495: note = U/M: U (0.04:0.91) in Small Intes. + Colon Epithelium
  misc_feature 1..495: note = source = chr17:77074568-77075062; Gene: ENGASE (intron)
  source 1..495: mol_type = genomic DNA
cggctgcctgtccgcagcctcaccccctcacgtggtttggtgttcgtcaccttcttcccttaagctctgatcctgttctgggtcgctgggctctggctttcatgcacagagatgttacatgccccacccaccccaggtgcagacgtcccatccaaagttgccgtggagtccgcgcggcgcttttaaatgtccataaaacaatcttggaccctgtgattgatgggaaggcttgagtcagagccaaccatcaaggtagagatagaagcaggtggtgaaaccttgggcgcagctcacagggctttcaaccccgaccttcgagttccgggagactctgttctgagggactgcctacccctccaaatagagtgggaagccagagacgggactttgacacgagacttcctgcttcccctcctttctctcccttgttcattggctcacagggggtagcagtgctcggtccattagatgcaatggcagatgcctgatgccccg

SEQ ID NO: 6793 - DNA, 169 bp, Homo sapiens
  misc_feature 1..169: note = U/M: U (0.04:0.9) in Small Intes. + Colon Epithelium
  misc_feature 1..169: note = source = chr9:18683283-18683451; Gene: ADAMTSL1 (intron)
  source 1..169: mol_type = genomic DNA
cgtgatctcggctcactgcaacctctgcctcccaggctgaggcgattctcctacttcagcctccggagtaactgggattacaggcgcatgctgccgtgcccagctaattttttgtattttttttttttggtagagacggggtttcaccttgttgcccaggctggtctcg

SEQ ID NO: 6794 - DNA, 188 bp, Homo sapiens
  misc_feature 1..188: note = U/M: U (0.03:0.89) in Small Intes. + Colon Epithelium
  misc_feature 1..188: note = source = chr6:12262875-12263062; Gene: EDN1 (Intergenic)
  source 1..188: mol_type = genomic DNA
cgggtggatcaccagagattaggaggtcgaaaccagcctgaccaacatagtgaaaccctgtctctactaaaaatataaaaattagccgggcgtggttgtgggcacctgtaatcccagttacttgggaggctgaggcaagagaatcgcttaaacctgggagggggaggttgcagtgagccgagattgcg

SEQ ID NO: 6795 - DNA, 198 bp, Homo sapiens
  misc_feature 1..198: note = U/M: U (0.01:0.87) in Small Intes. + Colon Epithelium
  misc_feature 1..198: note = source = chr4:2038234-2038431; Gene: C4orf48 (Intergenic)
  source 1..198: mol_type = genomic DNA
cgacttcccactccacctgacaaaagcagtaaaatcttgtgtctggtgcttagatgagctggttcagtgttgacggaagctgaagacagacggaagctccactacaacatgttcagggcggccctcgaggacagcgtggagaagaaatcctccctgtgggtataactcggatcagttagcttgcttgtctgcttcacg

SEQ ID NO: 6796 - DNA, 317 bp, Homo sapiens
  misc_feature 1..317: note = U/M: U (0.03:0.89) in Small Intes. + Colon Epithelium
  misc_feature 1..317: note = source = chr20:52285405-52285721; Gene: ZNF217 (Intergenic)
  source 1..317: mol_type = genomic DNA
cgcccaggctagagtgcagtggtgcgatctcggcttactgcaacctctgcctctcaggttcaagcgattctcctgcctcagcctcccaagtagctgggattacaggcgtgtgccaccatgctcggctaatttttgtgtatttagtagagacgggatttcaccatgttggccacgctggtctcaaactcctgacctcaggtgatccgcctgcctcggcttcccaaagtgctgagattacaggcatgtgccaccgtgcccagcctttgctgtgggatgttctaagtgaatgcataaactttatgttagagaaagccccg

SEQ ID NO: 6797 - DNA, 395 bp, Homo sapiens
  misc_feature 1..395: note = U/M: U (0.08:0.94) in Small Intes. + Colon Epithelium
  misc_feature 1..395: note = source = chr2:239320905-239321299; Gene: ASB1 (Intergenic)
  source 1..395: mol_type = genomic DNA
cgtaatgttgacttctttttatttcccgtaaacaattttactacatttcttccctgtcactaactgatgttctcttaaccatgattttaagtttcattgaatgggcaccttattgtagttcagttgcgtatattttctcatttctataatgatttattctttagtgcgttatgaaatacttgcttctggttttttctcctgggttatcttttttttattgatttctgatttgattgcatcttggggagagaatgtggcctgcccaataccggtgctttgaacggtgtggaggctgccctgatggcccagcacgtggtcactttcataaaagcgctatatatttttttcacaacttaattactttattgggcttaacaaatagcatttcctgctcg

SEQ ID NO: 6798 - DNA, 62 bp, Homo sapiens
  misc_feature 1..62: note = U/M: U (0.02:0.87) in Small Intes. + Colon Epithelium
  misc_feature 1..62: note = source = chr9:79345539-79345600; Gene: PRUNE2 (intron)
  source 1..62: mol_type = genomic DNA
cgggtacggtggctcacgcctgtaatcctggcattttgggaggccaaggcgggcagatcacg

SEQ ID NO: 6799 - DNA, 76 bp, Homo sapiens
  misc_feature 1..76: note = U/M: U (0.08:0.93) in Small Intes. + Colon Epithelium
  misc_feature 1..76: note = source = chr11:6398960-6399035; Gene: SMPD1 (Intergenic)
  source 1..76: mol_type = genomic DNA
cgatcccctgacatcgtgatccacccgccttggcctcccaaagcgctgggattacaggcgtgagccaccgcgcccg

SEQ ID NO: 6800 - DNA, 151 bp, Homo sapiens
  misc_feature 1..151: note = U/M: U (0.02:0.87) in Small Intes. + Colon Epithelium
  misc_feature 1..151: note = source = chr20:42982934-42983084; Gene: R3HDML (Intergenic)
  source 1..151: mol_type = genomic DNA
cgtttgccaccatgcccggctaatttttttatttttggtagagacggggtttcaccatgttggtcaggctggcctcaaactcctgacctcgtgatcggtgcgcctcggcctcccaaaatgctggggttacaggcgtgagccactgcacccg

SEQ ID NO: 6801 - DNA, 206 bp, Homo sapiens
  misc_feature 1..206: note = U/M: U (0.02:0.87) in Small Intes. + Colon Epithelium
  misc_feature 1..206: note = source = chr20:38304946-38305151; Gene: LOC339568 (Intergenic)
  source 1..206: mol_type = genomic DNA
cggcccatggcaaagttgcttatgagagggatcctgagtagggcaggaatagccctattctgatactctctgatgtgctcggtcttggctgggatcagtcaggggaactttggcctgacaataattgaagcgcggattcaaaggtgtggcagctggggctgtcaaccactcatgctttcctcagcgggttcctctgggggagatcg

SEQ ID NO: 6802 - DNA, 229 bp, Homo sapiens
  misc_feature 1..229: note = U/M: U (0.04:0.89) in Small Intes. + Colon Epithelium
  misc_feature 1..229: note = source = chr1:3431025-3431253; Gene: MEGF6,MEGF6 (intron,exon)
  source 1..229: mol_type = genomic DNA
cggccccagagttagacacgggtccctccacagcacctgggtgcgctttctgaccctgggcggggcggagcaggggaggggcgtcctaccttcacaggccttgccgtccgctgctagctgatagcccacgtggcactcacagcgggcgaggccccggaccacctggcacctgtgcatgcagctgccgttcctgttggcacacgggcttctacctgcagccacgggcccg

SEQ ID NO: 6803 - DNA, 276 bp, Homo sapiens
  misc_feature 1..276: note = U/M: U (0.02:0.87) in Small Intes. + Colon Epithelium
  misc_feature 1..276: note = source = chr9:110368576-110368851; Gene: KLF4 (Intergenic)
  source 1..276: mol_type = genomic DNA
cgagggcccccacgggggcggaaggcaggagctgaactcctccctggtgttcagagctggggttgattgcatggagtgaggattcttggtaagtgtagagtccaggctctacccttgataattgctccttctcttctttgtagcttttacttgtattgcttctaccacatcataaacagtttattatatttccattcaattaaacccaggtttattgaactagattcagcgataggtacaagggacattgaaatgaatcagacactagtcctcgcg

SEQ ID NO: 6804 - DNA, 354 bp, Homo sapiens
  misc_feature 1..354: note = U/M: U (0.05:0.9) in Small Intes. + Colon Epithelium
  misc_feature 1..354: note = source = chr1:6422485-6422838; Gene: ACOT7 (intron)
  source 1..354: mol_type = genomic DNA
cgtctcaaaaaaaaaaaagaaaaaaaaaagtcaagagatggcagcacctcttcccccatccctcccatacctacccaggcagccaagcatatagaaagaaggtaggaaatgagacaggcacctagaactcaaaagcacactgagcccagctcatcagagggcactcggaagagagaattcaaggagaactccgcaacgacatgccctagaatgggaggccacatccctctccccaaccgaaactcactgcctcatgctagaggaagctggtagggtcagaaacttacatccaggctccagaaagatctctcagagctcaatgtgaaaaaaacaaatgacctttggctaggcgcg

SEQ ID NO: 6805 - DNA, 88 bp, Homo sapiens
  misc_feature 1..88: note = U/M: U (0.02:0.86) in Small Intes. + Colon Epithelium
  misc_feature 1..88: note = source = chr19:39306298-39306385; Gene: ECH1,ECH1 (exon,intron)
  source 1..88: mol_type = genomic DNA
cgtggcctggaccgacttcacgaggtcttgggtctgcagcatgctcatgttccaggacgcctggtaccgagggtgttgagagagaacg

SEQ ID NO: 6806 - DNA, 95 bp, Homo sapiens
  misc_feature 1..95: note = U/M: U (0.01:0.85) in Small Intes. + Colon Epithelium
  misc_feature 1..95: note = source = chr10:97322759-97322853; Gene: SORBS1 (Intergenic)
  source 1..95: mol_type = genomic DNA
cgtctaggctgctatgcaccgtactatacttgtgctaagagctttacatgcgttaactcacatccaccacacgaccccaggtgggaatagtgtcg

SEQ ID NO: 6807 - DNA, 123 bp, Homo sapiens
  misc_feature 1..123: note = U/M: U (0.09:0.93) in Small Intes. + Colon Epithelium
  misc_feature 1..123: note = source = chr20:49969364-49969486; Gene: MIR3194 (Intergenic)
  source 1..123: mol_type = genomic DNA
cggctcggtggtaactgtcacttttatgcgtcctaatttttctataatatacatacattatttgagtaagaaaaataaacatgtttgtagcgggatcagatttacgcgtgtgcaacttgtgcg

SEQ ID NO: 6808 - DNA, 136 bp, Homo sapiens
  misc_feature 1..136: note = U/M: U (0.09:0.93) in Small Intes. + Colon Epithelium
  misc_feature 1..136: note = source = chr9:114247470-114247605; Gene: KIAA0368 (promoter-TSS)
  source 1..136: mol_type = genomic DNA
cgtggaggcgcgcgcctgtaatcccaactactcgggaggctgaggtaggagaatcgcttgaacccgggaggcggagcttgcagtgagccgagatcgcaccactgcactccagcctgggggacagagcgagactccg

SEQ ID NO: 6809 - DNA, 308 bp, Homo sapiens
  misc_feature 1..308: note = U/M: U (0.09:0.93) in Small Intes. + Colon Epithelium
  misc_feature 1..308: note = source = chr19:4054373-4054680; Gene: ZBTB7A (exon)
  source 1..308: mol_type = genomic DNA
cgcctccgacagcgaggcggcctcctcctctccgccgcggccgtagtggccgttctgcgtggcggccggcggggccaccggcggcggaaagagacccccggtgggggcgtcctcatcccgctctggccacagacccgggttgctgtcgccctcgtccccgtcccccgtcgggggccgctcggccggggggcccggcccatagaagtctaagccgttgcagtcgcccgcggccacggcggccacagcggcggccacggcctccttggtggcatccaggtcatcatcggacgccccaaaggcggaccacg

SEQ ID NO: 6810 - DNA, 377 bp, Homo sapiens
  misc_feature 1..377: note = U/M: U (0.01:0.85) in Small Intes. + Colon Epithelium
  misc_feature 1..377: note = source = chr5:149547488-149547864; Gene: CDX1 (intron)
  source 1..377: mol_type = genomic DNA
cgggagcagtgggaaggggggctactgtttggctcctgagcctgtgaacctcctgcccccaggcaggcctctctgatccgccctcttcaaaggcagggtagggggcaggacaaagggcccaactttaatgaggggcggcttgacctccgttatgggtcccccctttgtcatgcaactggctctgccttggctcggtagtgactcctgttggccggaaagtgaacacgacgttccattgtccggactgtgtccggcctgtcctgacaaaggccacctagccttgggggcgggaagctggcctgcccaccctttgatgtccagcccctcctccccttaccccagctgcgaataatcctgggacttctcccacctcctcg

SEQ ID NO: 6811 - DNA, 114 bp, Homo sapiens
  misc_feature 1..114: note = U/M: U (0.02:0.85) in Small Intes. + Colon Epithelium
  misc_feature 1..114: note = source = chr22:25324641-25324754; Gene: TMEM211 (Intergenic)
  source 1..114: mol_type = genomic DNA
cgggctgggcacggtggttcactcctgtaatcccagcagtttgggaggccgaagtgggtggatcacccgaggtcaggagttcaagaccatcctggctaacatggtgaaaccccg

SEQ ID NO: 6812 - DNA, 141 bp, Homo sapiens
  misc_feature 1..141: note = U/M: U (0.02:0.85) in Small Intes. + Colon Epithelium
  misc_feature 1..141: note = source = chr19:552942-553082; Gene: GZMM (Intergenic)
  source 1..141: mol_type = genomic DNA
cgcgcccggcctaatctttaactttttatggcatcattggcagtggaaggttctcaggtcacaagtgaagagcctcataactcacaaaccaggcacgcccctgttcccggcacctgggtccagacacaaccccctgccccg

SEQ ID NO: 6813 - DNA, 202 bp, Homo sapiens
  misc_feature 1..202: note = U/M: U (0.08:0.9) in Small Intes. + Colon Epithelium
  misc_feature 1..202: note = source = chr4:965124-965325; Gene: DGKQ (intron)
  source 1..202: mol_type = genomic DNA
cgcacgtaggcccagcactcctcctgcctctgcagttgggcctctcaaggggcagccctgggctcaccaggttcgccaggtggcaggggcttctcggccttcggcagattggctttaccaaggacatctgtgtctcactcccccgaaactacgcatacccctaattgtccctgctacgtgctgtgcaccgtgcctgagaccg

SEQ ID NO: 6814 - DNA, 160 bp, Homo sapiens
  misc_feature 1..160: note = U/M: U (0.02:0.82) in Small Intes. + Colon Epithelium
  misc_feature 1..160: note = source = chr7:1563550-1563709; Gene: MAFK (Intergenic)
  source 1..160: mol_type = genomic DNA
cgagggtaggagggaccccacccctcccggggcgccccgggctcatggtgcaactggactcgtctccctgcaagaaccagccctgcaccgctggggtcctggggcagaccccgctctgtaccccagtcccagagccccggctgccacaccgctcttcccg

SEQ ID NO: 6815 - DNA, 229 bp, Homo sapiens
  misc_feature 1..229: note = U/M: U (0.14:0.94) in Small Intes. + Colon Epithelium
  misc_feature 1..229: note = source = chr14:105723681-105723909; Gene: BRF1 (intron)
  source 1..229: mol_type = genomic DNA
cgggaccagagcagcaaagccccaccacgcaagaacctcgcaagcaatcagatggttaggacgccagcccactcatccacgccctgggctggaggcccctgacctctcttgcaactccatgcagaacagcaaggcctcccaccctaagaaggtgccagggctgggtacaggggcattccgacacagagcagaacccccaggacggctgggacgtgagcggtgaggcccg

SEQ ID NO: 6816 - DNA, 293 bp, Homo sapiens
  misc_feature 1..293: note = U/M: U (0.14:0.94) in Small Intes. + Colon Epithelium
  misc_feature 1..293: note = source = chr4:1015911-1016203; Gene: FGFRL1,FGFRL1 (exon,intron)
  source 1..293: mol_type = genomic DNA
cgtgggtccccttttgaccgcccccccggctccggaccccaagcccctcctcgctgactgttcctcggtcccacccgcaggccccccaaagatggcggacaaggtggtcccacggcaggtggcccggctgggccgcactgtgcggctgcagtgcccagtggagggggacccgccgccgctgaccatgtggaccaaggatggccgcaccatccacagcggctggagccgcttccgcgtgctgccgcaggggctgaaggtgaagcaggtggagcgggaggatgccggcgtgtacg

SEQ ID NO: 6817 - DNA, 320 bp, Homo sapiens
  misc_feature 1..320: note = U/M: U (0.1:0.9) in Small Intes. + Colon Epithelium
  misc_feature 1..320: note = source = chr11:864528-864847; Gene: TSPAN4 (intron)
  source 1..320: mol_type = genomic DNA
cgcaggcccaactgcagggctgggggctccatcctcactcccagggagcactgtgggcccggtgtggacagagtggccctgcatgtgccctcacgggcagccaggacagcgggtgtggatttaccaggcctggaggggcagcgccagcgaccctgggaggctgtgctgtggctctatagcgactggggcacaagggcactgctaccccacccggagggtgcgccccaggttgtcccccgccctctgacgcagcgtcctgagccgtctgctcccagcgccccatccgggccgcgcaccgtggggttctcctctgtagagcg

SEQ ID NO: 6818 - DNA, 301 bp, Homo sapiens
  misc_feature 1..301: note = U/M: U (0.02:0.81) in Small Intes. + Colon Epithelium
  misc_feature 1..301: note = source = chr20:42982573-42982873; Gene: R3HDML (Intergenic)
  source 1..301: mol_type = genomic DNA
cgagtagctgagattacaggtgctcgctgccacacccagctaatttttgtatttttagtagagatgggattacaccgtgttggccagcctggtctcaaactcctgacctcaagtgatccacctgcctcagcctcccaaactgctgggattacaggcatgagccactacacccgaccaagaatattaatacttttttttaaaaaatatcgaagttatttatttatttatttatttatttatttatttatttattttgagatggagtctctctctgttgcccaggctggagtgcagtggcacg

SEQ ID NO: 6819 - DNA, 119 bp, Homo sapiens
  misc_feature 1..119: note = U/M: U (0.12:0.9) in Small Intes. + Colon Epithelium
  misc_feature 1..119: note = source = chr10:74451042-74451160; Gene: MCU (promoter-TSS)
  source 1..119: mol_type = genomic DNA
cgtgttagccaggatggtctcgatctcctgacctcgtgatccgcccgcctctgcctcccaaagtgctgggattacaggcgtgagccaccgcgcccggccttacatgattttttattacg

SEQ ID NO: 6820 - DNA, 147 bp, Homo sapiens
  misc_feature 1..147: note = U/M: U (0.16:0.94) in Small Intes. + Colon Epithelium
  misc_feature 1..147: note = source = chr6:71121859-71122005; Gene: FAM135A (Intergenic)
  source 1..147: mol_type = genomic DNA
cggtgtcttaggcctgtaatcccagcactttggaaggccaaggcgggtggatcacctaaggtcaggagttcgaaaccagcctgaccaatatggtgagaccacgtctctactaacaatacaaaaagtagtcaggcgtggtggtgtgcg

SEQ ID NO: 6821 - DNA, 112 bp, Homo sapiens
  misc_feature 1..112: note = U/M: M (0.96:0.15) in Small Intes. + Colon Epithelium
  misc_feature 1..112: note = source = chr6:42521871-42521982; Gene: UBR2 (Intergenic)
  source 1..112: mol_type = genomic DNA
cgaggagcccttcagcccgccgctgcgctgtgagggcccctctctggggctggccgaggccggagccggctccctctgctcactgggaagtgtgaaaagagaggcgccggcg

SEQ ID NO: 6822 - DNA, 35 bp, Homo sapiens
  misc_feature 1..35: note = U/M: M (0.96:0.19) in Small Intes. + Colon Epithelium
  misc_feature 1..35: note = source = chr10:112838797-112838831; Gene: ADRA2A (exon)
  source 1..35: mol_type = genomic DNA
cgcggcgcgggccgggggcgacggggatcgggacg

SEQ ID NO: 6823 - DNA, 50 bp, Homo sapiens
  misc_feature 1..50: note = U/M: M (0.92:0.21) in Small Intes. + Colon Epithelium
  misc_feature 1..50: note = source = chr2:202900483-202900532; Gene: FZD7 (exon)
  source 1..50: mol_type = genomic DNA
cgaggccatcgaggccaactcgcagtacttccacctggccgcgtgggccg

SEQ ID NO: 6824 - DNA, 79 bp, Homo sapiens
  misc_feature 1..79: note = U/M: M (0.78:0.07) in Small Intes. + Colon Epithelium
  misc_feature 1..79: note = source = chr9:140189496-140189574; Gene: NRARP (Intergenic)
  source 1..79: mol_type = genomic DNA
cgccgggtcctgctcccgtccgaagtgtgacctgtggttggtcgcgtccacgtggtcctgctgactatctacttactcg

SEQ ID NO: 6825 - DNA, 78 bp, Homo sapiens
  misc_feature 1..78: note = U/M: M (0.85:0.2) in Small Intes. + Colon Epithelium
  misc_feature 1..78: note = source = chr19:13813350-13813427; Gene: CCDC130 (Intergenic)
  source 1..78: mol_type = genomic DNA
cgtggctggtggttggcgcggctgcgctgcggcccggggcagtgcggagccgggacagtcgcggcgctgacgcccgcg

SEQ ID NO: 6826 - DNA, 76 bp, Homo sapiens
  misc_feature 1..76: note = U/M: M (0.96:0.08) in Small Intes. + Colon Epithelium
  misc_feature 1..76: note = source = chr4:94755859-94755934; Gene: ATOH1 (Intergenic)
  source 1..76: mol_type = genomic DNA
cggggagctgtgcggccacatttaacaccatcatcacccctccccggcctcctcaacctcggcctcctcctcgtcg

SEQ ID NO: 6827 - DNA, 292 bp, Homo sapiens
  misc_feature 1..292: note = U/M: M (0.93:0.08) in Small Intes. + Colon Epithelium
  misc_feature 1..292: note = source = chr2:114034961-114035252; Gene: PAX8 (intron)
  source 1..292: mol_type = genomic DNA
cgatccgaccctccttattataacaaatgtcccgtttgcagagcgggacatcatattcgcggagaattcattctgaaatattgatttcctctcacttcgccggcccaaatcgatagcgatgcgccctggccccataaatcgccttctctgcggccggccgggctccatccatcactgcgggccgcgctgcgcctccaccgctgtccgcactcgctgcgcgccgggacggctgcgcccaccagccctgaccctggagctccttcccagcaaagaccctgcccagccctggccg

SEQ ID NO: 6828 - DNA, 144 bp, Homo sapiens
  misc_feature 1..144: note = U/M: M (0.87:0.03) in Small Intes. + Colon Epithelium
  misc_feature 1..144: note = source = chr1:226814277-226814420; Gene: C1orf95 (Intergenic)
  source 1..144: mol_type = genomic DNA
cgtcgctgagctcctgacccgtcttccttttcttcgggcaccttgtaatgcacccgaccgtccagaagggggcagcctctgcaggcggcgccaggctatttcagacgcctctgtaggcggccctcttgatctcactccagcacg

SEQ ID NO: 6829 - DNA, 238 bp, Homo sapiens
  misc_feature 1..238: note = U/M: M (0.96:0.12) in Small Intes. + Colon Epithelium
  misc_feature 1..238: note = source = chr4:94755553-94755790; Gene: ATOH1 (Intergenic)
  source 1..238: mol_type = genomic DNA
cgccgacaactaaggttcctccctttctcctactaggcccctaaggagaaaggggaaactgagcggagaatgggttaaatccttggaagcaggggagaggcaggggaggagagaagtcggaggagtataaagaaaaggacaggaaccaagaagcgtgggggtggtttgccgtaatgtgagtgtttcttaattagagaacggttgacaatagagggtctggcagaggctcctggccgcg

SEQ ID NO: 6830 - DNA, 71 bp, Homo sapiens
  misc_feature 1..71: note = U/M: M (0.96:0.13) in Small Intes. + Colon Epithelium
  misc_feature 1..71: note = source = chr10:112838336-112838406; Gene: ADRA2A (exon)
  source 1..71: mol_type = genomic DNA
cggcccgcagccggccgagccgcgctgcgagatcaacgaccagaagtggtacgtcatctcgtcgtgcatcg

SEQ ID NO: 6831 - DNA, 474 bp, Homo sapiens
  misc_feature 1..474: note = U/M: M (0.93:0.1) in Small Intes. + Colon Epithelium
  misc_feature 1..474: note = source = chr6:26017646-26018119; Gene: HIST1H1A (exon)
  source 1..474: mol_type = genomic DNA
cgaggctccggtaccctttgtctgcaccaacgttcccttgcttaccaggctcttaatgcccagcttaatgcggctgttgttcttctccacgtcgtagcctgcggccgccagcgcctttttaagagctgccaacgacacaccaccacgctccttagaggaggaagcagcctgcacgatcagctctgacacggaagggccagcgggttttttcttggaggctgctgcagccttagcaggtttctttgccttcttgccagctaaaggtttctcaggagcagcagaagcggcgggggcgggaggcactgtttcagacatggtgactaacacagcacaccaaataaagtggtataaacctgacgaagcaggatgcgaaaaaaaggccccaacgcagcctatttatagggtgggactgcgccgtgattggtgcccgtcagtgcccgcccctcgcgccctagcgccccctgcgcgctgccg

SEQ ID NO: 6832 - DNA, 194 bp, Homo sapiens
  misc_feature 1..194: note = U/M: M (0.94:0.13) in Small Intes. + Colon Epithelium
  misc_feature 1..194: note = source = chr2:114035273-114035466; Gene: PAX8 (intron)
  source 1..194: mol_type = genomic DNA
cgcggcctgggagctcgagtgtgtttgaaggccctgcttccgggcgcaggtggggagggggttttgactccgcgagcggcttagtcctcaccagccggacgccccgcgcgcggcgcccggcctgcccggtgctgggccaggaggagtcggagagcacctgagtgcgctgccggctcccgggcccgggaccaccg

SEQ ID NO: 6833 - DNA, 313 bp, Homo sapiens
  misc_feature 1..313: note = U/M: M (0.92:0.11) in Small Intes. + Colon Epithelium
  misc_feature 1..313: note = source = chr2:114034646-114034958; Gene: PAX8 (intron)
  source 1..313: mol_type = genomic DNA
cggtcccagggctccccaaccccgccgcgccggggaatggctgcgaggtctctcccctgaggaccttgaagggaccccgcgccttctgggggcagccggacgattctggcccaggtctctgaggggaatgggggccgggagggagcattcgtctgcagctctagagagaacccgagtgagaaatcttccggcgccccagggggttcccgctcccctcctagttgggccatggccctgggactggagactgcgccgcagagcccgggcccccgcagtgcgcttggctaaatagagatctcagcctcgctgcgcg

SEQ ID NO: 6834 - DNA, 75 bp, Homo sapiens
  misc_feature 1..75: note = U/M: M (0.92:0.12) in Small Intes. + Colon Epithelium
  misc_feature 1..75: note = source = chr3:194118116-194118190; Gene: GP5 (exon)
  source 1..75: mol_type = genomic DNA
cggttcagccacagctcctgcaggccccccatctccccgaagagcacccccgggagctctgccagcgggttctcg

SEQ ID NO: 6835 - DNA, 168 bp, Homo sapiens
  misc_feature 1..168: note = U/M: M (0.96:0.16) in Small Intes. + Colon Epithelium
  misc_feature 1..168: note = source = chr10:112838475-112838642; Gene: ADRA2A (exon)
  source 1..168: mol_type = genomic DNA
cgcacccgcgtgccacccagccgccggggtccggacgccgtcgccgcgccgccggggggcaccgagcgcaggcccaacggtctgggccccgagcgcagcgcgggcccggggggcgcagaggccgaaccgctgcccacccagctcaacggcgcccctggcgagcccgcg

SEQ ID NO: 6836 - DNA, 125 bp, Homo sapiens
  misc_feature 1..125: note = U/M: M (0.92:0.13) in Small Intes. + Colon Epithelium
  misc_feature 1..125: note = source = chr2:25500163-25500287; Gene: DNMT3A (intron)
  source 1..125: mol_type = genomic DNA
cgcgggggccccctccagcctgtccggggcctccccgttcccaggccagggcttccccctcctcccagacctcgttgctctgcccggtgaggccccgggctcccagcagggggcgcctgctcgcg

SEQ ID NO: 6837 - DNA, 317 bp, Homo sapiens
  misc_feature 1..317: note = U/M: M (0.84:0.05) in Small Intes. + Colon Epithelium
  misc_feature 1..317: note = source = chr8:27449792-27450108; Gene: CLU (Intergenic)
  source 1..317: mol_type = genomic DNA
cgctgatgcgatccacgtgcctccccgtcctcaggccgcttcctttcctggtttccaggtcctcgtttctcccagcgctgccctccccatctaagcccaagtcgccgtgagcccgcgctgcccccttgtggccaaagccctccccagctcaggaaacgggaacgcttggcggccaggctgagagtcggtgcgcgtgacccggcttctgctcgcagcatccaagaagttgcaataacgtggaaggatggggaacggcgcctccctggctagcgtgaaactcagccacagcacaaaattgaggctgttggccgtgagcg

SEQ ID NO: 6838 - DNA, 195 bp, Homo sapiens
  misc_feature 1..195: note = U/M: M (0.92:0.15) in Small Intes. + Colon Epithelium
  misc_feature 1..195: note = source = chr2:233793224-233793418; Gene: NGEF (promoter-TSS)
  source 1..195: mol_type = genomic DNA
cggtctcccgcagggtcgcagctcggcgacccgctctgaagctccgagcccggcctcggggaatgtgtccccgctggagggggtctccgtcttgtctctgctccaggcggagactggggtctcaggggctccttgcaagcccgctcctgagcctcgcggtggggagggggccggcgcggaggtctttcccgggcg

SEQ ID NO: 6839 - DNA, 246 bp, Homo sapiens
  misc_feature 1..246: note = U/M: M (0.93:0.16) in Small Intes. + Colon Epithelium
  misc_feature 1..246: note = source = chr7:329232-329477; Gene: LOC100288524 (promoter-TSS)
  source 1..246: mol_type = genomic DNA
cggatggcttctcttctcttccctctgcgtgcgcctaaaacggagcttcgacccagaggggacccgtgaagcggcgactctgcggatgggaagtccccctccctccgggccctggcggggactcacttccaggcactgagaggccgctggacgggagcacagggcgctgcagaaagcgctgggacctgggtctctggctcagctgaccccctgaccaaggccgggagacgcccgccgggccccacg

SEQ ID NO: 6840 - DNA, 25 bp, Homo sapiens
  misc_feature 1..25: note = U/M: M (0.9:0.16) in Small Intes. + Colon Epithelium
  misc_feature 1..25: note = source = chr18:45058273-45058297; Gene: IER3IP1 (Intergenic)
  source 1..25: mol_type = genomic DNA
cgcatccatcttccggccgcccgcg

SEQ ID NO: 6841 - DNA, 68 bp, Homo sapiens
  misc_feature 1..68: note = U/M: M (0.96:0.22) in Small Intes. + Colon Epithelium
  misc_feature 1..68: note = source = chr10:112838267-112838334; Gene: ADRA2A (exon)
  source 1..68: mol_type = genomic DNA
cgtgtgggtcatctcggccgtcatctccttcccgccgctcatctccatcgagaagaagggcggcggcg

SEQ ID NO: 6842 - DNA, 194 bp, Homo sapiens
  misc_feature 1..194: note = U/M: M (0.84:0.12) in Small Intes. + Colon Epithelium
  misc_feature 1..194: note = source = chr14:21094173-21094366; Gene: OR6S1 (Intergenic)
  source 1..194: mol_type = genomic DNA
cgcctgtaatcccagcactttgggaggccgaggcgggcggatcaagaggtcaggagatcgagaccattctgaccaacatggtgaaaccccgtccttagtaaaaaaaaaaaataccaaagccgggggtggtggcgcggacggacctgtactcccagctactcgggaggctgaggcaggggaatcgcttgaacccg

SEQ ID NO: 6843 - DNA, 179 bp, Homo sapiens
  misc_feature 1..179: note = U/M: M (0.82:0.11) in Small Intes. + Colon Epithelium
  misc_feature 1..179: note = source = chr6:27473456-27473634; Gene: ZNF184 (Intergenic)
  source 1..179: mol_type = genomic DNA
cgcagggttaataatgatgatgacagctagaatgcagagttcaacgcagtgttaccaaaggagatgacacaattgtaatccaggagactcagttgcctttggggtgcaattagaaggaaactatttgggagaagtcaggctaaaaccaaaccgtagccgacaggattcgaacctgcgcg

SEQ ID NO: 6844 - DNA, 331 bp, Homo sapiens
  misc_feature 1..331: note = U/M: M (0.74:0.03) in Small Intes. + Colon Epithelium
  misc_feature 1..331: note = source = chr19:37096487-37096817; Gene: ZNF529,ZNF382 (promoter-TSS,intron)
  source 1..331: mol_type = genomic DNA
cgcgaagggggattttgcccgttctgatcccgcggaagcgccatcgctggcggcgggtccccgcgcggagcgggcgctgtgtgttcgcgcgcgcgggcgcgcgctgaataggggtggcctcctgcgcccaacctgctgcattttaggtgcttgcctctctttgggatgttgtggccgattgtgtgtgaaaagtgaacggagtagtgttgctgcgcgaggtttcctctgcgtgtgtctatttttagattaggtgtgagtcgcatttgagactgcctttgagtgtggagaattgcaagtgatttgtaggtgtggttgtgactgcctggagtcg

SEQ ID NO: 6845 - DNA, 51 bp, Homo sapiens
  misc_feature 1..51: note = U/M: M (0.76:0.1) in Small Intes. + Colon Epithelium
  misc_feature 1..51: note = source = chr12:62585454-62585504; Gene: FAM19A2 (exon)
  source 1..51: mol_type = genomic DNA
cgccggatgcgcgcggtgcgctcagctccctggactgcaagaatcaaggcg

SEQ ID NO: 6846 - DNA, 194 bp, Homo sapiens
  misc_feature 1..194: note = U/M: U (0.23:0.85) in Colon + Heart Fibroblasts
  misc_feature 1..194: note = source = chr13:108206339-108206532; Gene: FAM155A (intron)
  source 1..194: mol_type = genomic DNA
cgcttacttcatggctacatgccatggagctatccagccctgagagccttagtcccacatctgcaaatgcagataatcctgtgagctcatgcagctgtatgggtaagtgggtgacatgacagcaagctcctgacactacgtagggttcctgatgtatggcagacgcactctgagctgagcccggagccgaactc

SEQ ID NO: 6847 - DNA, 376 bp, Homo sapiens
  misc_feature 1..376: note = U/M: U (0.27:0.86) in Colon + Heart Fibroblasts
  misc_feature 1..376: note = source = chr2:75765726-75766101; Gene: EVA1A (intron)
  source 1..376: mol_type = genomic DNA
cgaagagtaaatgtttaaaccaactgtagtacatctataccatgtaatactactcagcaacaaaaaaagaacaaactgttgatacacaaggcaacctggatgaattccagaggattattctgaatttaaaaacgcaatcccaaaaggctgcatattgtatgatttcatttatacaacattcttgaaatgacaaaattatagaaatagggaataaattagtagttttcagaggttaaggaaggattggggtgagaaagaaagttattgtagctaaaaaacggcaacatgagaaatccttgtgatgatgcaaatgttctgtatcttgactgtatcaatgtcaacatcccggttgtgatattgtagcacagttttgcac

SEQ ID NO: 6848 - DNA, 312 bp, Homo sapiens
  misc_feature 1..312: note = U/M: U (0.31:0.89) in Colon + Heart Fibroblasts
  misc_feature 1..312: note = source = chr1:67873294-67873605; Gene: SERBP1 (exon)
  source 1..312: mol_type = genomic DNA
cgtcatgtaatgggaaaaatacaaaacccacccactttcagtccatttctttccaaaagaaccccagctgtcggagcactctgaaaatgtctagaaaatgtctaaacacatgcttatcttagtactctgagtgcagctgccatatgaagcaacatttctttgtgggttacgtgtaaaacaaagaattcaatatacaaagttcccaaaataaaacaaaaatttacttggacgttattcattggctaatagaacattttagtcccaatccaacaaaattttaggcaaatgtcaagaaccaagttaaccaaaacc

SEQ ID NO: 6849 - DNA, 308 bp, Homo sapiens
  misc_feature 1..308: note = U/M: U (0.31:0.87) in Colon + Heart Fibroblasts
  misc_feature 1..308: note = source = chr1:213887598-213887905; Gene: LINC00538 (Intergenic)
  source 1..308: mol_type = genomic DNA
cgctaatgttatatagatgttagcacttgttgttattgttatcctcaccaaaaatgtaatttgtgggattttaaagttttgggatgatttccaagaagaaggagaaaatgctcattcaaatagtcattttcataccagtagattatctttcccttttatgctgcttatttttctcaatgtctatttatccttggttgttcgtttatacgtaggagtgaaggattcaattgattaaaataaatggctttcgtctgtcatttctgacctttctctgtcctgagagccctgatggccagctctgggctggc

SEQ ID NO: 6850 - DNA, 90 bp, Homo sapiens
  misc_feature 1..90: note = U/M: U (0.36:0.91) in Colon + Heart Fibroblasts
  misc_feature 1..90: note = source = chr13:113185690-113185779; Gene: TUBGCP3 (intron)
  source 1..90: mol_type = genomic DNA
cggaggcgtcatcgacttaacctagacttcaattgtccatgacagaaataagcccccgttgagtaatctcggcagtgacgaagtcaccgc

SEQ ID NO: 6851 - DNA, 457 bp, Homo sapiens
  misc_feature 1..457: note = U/M: U (0.25:0.8) in Colon + Heart Fibroblasts
  misc_feature 1..457: note = source = chr7:90940368-90940824; Gene: FZD1 (Intergenic)
  source 1..457: mol_type = genomic DNA
cgttagtgtgataggcagaataaagcctcctcccagacatatccatgtcctaatcctgagagcctgtgactatgttaccttgcacagccacagagaatttgcagatgggattaaagttaaggaccttcagatgggggaattatcctggagtatctagttgggcccaatctaatcacatgaatcattaaaagcaaagaatctgtctcagctgtggtcagaaagggggcggtgactacaggagaatgatcagagggttgcaacatcgctggctttaaagatgcatgatggaggccaggaatgctggcgtcctctggaaggcaagaaaacgggaaaggcaagtaaatggaaaaggcaaggaagtggaaaaggcaaggaaatagattccctctagagtctccagaaagggatacagcccagtctgacacctttatctaagcccagtgagattctgtgggac

SEQ ID NO: 6852 - DNA, 464 bp, Homo sapiens
  misc_feature 1..464: note = U/M: U (0.33:0.88) in Colon + Heart Fibroblasts
  misc_feature 1..464: note = source = chr15:68705786-68706249; Gene: ITGA11 (intron)
  source 1..464: mol_type = genomic DNA
cgacttacggtgttcagagcttacagccccactgggcaggcaacagacatgtttataagtcaacagagcctgaagtgaagccaggagaagtttggactagggtggggtgatctgagttctaatctcagctttgtcattaacttggctggatgtccattgagagccccggtgcctctctgggcctcagcttccccatctgtaaaatgagaggctcctgctttgtaacatcgaagacccaccacggcacatgtcagtgaggttcccttgggcagacgccagctgacttccagttgtcggcactcgagcatctgtcttgagtctcagcaaacaatttagaattggaaaccaggcagtgtggaggaatgcaaactcatcttaatgttggccggagccatgcgcatttaggaagggaaatctccaggcaaaaacgataatattttgcattcccaagccaaggaaagaac

SEQ ID NO: 6853 - DNA, 152 bp, Homo sapiens
  misc_feature 1..152: note = U/M: U (0.34:0.88) in Colon + Heart Fibroblasts
  misc_feature 1..152: note = source = chr8:28302585-28302736; Gene: FBXO16 (intron)
  source 1..152: mol_type = genomic DNA
cggcatgagtcaaaatatcgcagcatactttttgggggatttaatgatgccgtatgctctttatcaaaactacgaaacataaatagtgattataattagtatatttacaaaaaacacaagaatagacagatacaatcatgagtcccattcac

SEQ ID NO: 6854 - DNA, 200 bp, Homo sapiens
  misc_feature 1..200: note = U/M: U (0.31:0.85) in Colon + Heart Fibroblasts
  misc_feature 1..200: note = source = chr2:8110088-8110287; Gene: LOC339788 (intron)
  source 1..200: mol_type = genomic DNA
cggccgctgcagccaagaccacacagaactgggacgggcatatgtgcagacctggggagggctgctgtgggcgggggccaggctctgccgcgtgggtcacactccaagtctgtaacttctgcttgttttacaggaccctgagcatcaaaaggagctacctctgtgtaattcagaatggcggagcctcatgggaggggatc

SEQ ID NO: 6855 - DNA, 60 bp, Homo sapiens
  misc_feature 1..60: note = U/M: U (0.34:0.86) in Colon + Heart Fibroblasts
  misc_feature 1..60: note = source = chr4:70391691-70391750; Gene: UGT2B4 (Intergenic)
  source 1..60: mol_type = genomic DNA
cgcctgtagtcccagctactccggagtctgaggcaggagaatggcgtgaacccgggaggc

SEQ ID NO: 6856 - DNA, 111 bp, Homo sapiens
  misc_feature 1..111: note = U/M: U (0.38:0.9) in Colon + Heart Fibroblasts
  misc_feature 1..111: note = source = chr6:101175196-101175306; Gene: ASCC3 (intron)
  source 1..111: mol_type = genomic DNA
cgtcacgcccaaatccgcgtattcacagacttgtcccaaaaggaattttttgaattttgaactaaagaattatgagagagatcataaaatctctcgtgtaataaagcctcc

SEQ ID NO: 6857 - DNA, 156 bp, Homo sapiens
  misc_feature 1..156: note = U/M: U (0.31:0.83) in Colon + Heart Fibroblasts
  misc_feature 1..156: note = source = chr11:8378249-8378404; Gene: LMO1 (Intergenic)
  source 1..156: mol_type = genomic DNA
cggctggggcatctgaggagccggaagaccctcatctccgctggctttgggaaacagggacaccagctgtcagatagctggaccgtgactcatggctctcagcagtggtgactgtctatggaggtccaaggcccttggtggagctgagagcactcc

SEQ ID NO: 6858 - DNA, 113 bp, Homo sapiens
  misc_feature 1..113: note = U/M: U (0.35:0.86) in Colon + Heart Fibroblasts
  misc_feature 1..113: note = source = chr16:88953123-88953235; Gene: CBFA2T3 (intron)
  source 1..113: mol_type = genomic DNA
cgctggtttccagccttggccttgatggagcgtggacctaggacgtggacacccacgttctgtggctgctcaagtgatcctccagccttggtgaggacggcctcaagacccac

SEQ ID NO: 6859 - DNA, 256 bp, Homo sapiens
  misc_feature 1..256: note = U/M: U (0.31:0.82) in Colon + Heart Fibroblasts
  misc_feature 1..256: note = source = chr10:109040817-109041072; Gene: SORCS1 (Intergenic)
  source 1..256: mol_type = genomic DNA
cgtggttgtcatactgtttgttaagaacctctggaatgggtgttgagttttatcgcaggccttttctgcattttttgagataatcatgtggtttttgtcattggttctgtttatatgatggattacgtttattgatttgtgtatgttgaaccagccttgcatcccagggatgaagcagacttgatggttggggttaatcttttttgatgtgctgctggattcggtttgccagtattttattgaggattttcacgtc

SEQ ID NO: 6860 - DNA, 440 bp, Homo sapiens
  misc_feature 1..440: note = U/M: U (0.34:0.84) in Colon + Heart Fibroblasts
  misc_feature 1..440: note = source = chr10:72989131-72989570; Gene: UNC5B (intron)
  source 1..440: mol_type = genomic DNA
cggaaggtcctgctccaagcctgagaattctgctttccagtcagtaagttgtttattacacccttgacagtgtcctcctccgcccctgcccctggatcctgaggagcctgcagagggcggggcagggcctgctgagggtctgacctctcaagggaaaggggtcgctggaagcgtggatcaagccatccaccctccttcccatcacggcccactggaccagagcgcttgcccgagctcccggaggccctgatctctgctggaagggcaggctaaacagaaattccctgggaccttggggcatctccctctcacttccctggacttcctttccaaggctccttctagggagttgttgtgcttctggggcagggcgtgtagttctcagagcttcttaggaaccgcagtcttgcagaccctataaaggggtgcatgagggcccc

SEQ ID NO: 6861 - DNA, 260 bp, Homo sapiens
  misc_feature 1..260: note = U/M: U (0.37:0.85) in Colon + Heart Fibroblasts
  misc_feature 1..260: note = source = chr11:12816156-12816415; Gene: TEAD1 (intron)
  source 1..260: mol_type = genomic DNA
cgcagttctgccggaggccttcctgtcagagcctcctgggccagaatgggcctctgtggcgagccgggcctgtaactgttcccactcataatgagcagagctgctcctgcaacccggcaggagcacccgagtgggtgtgcatgcacataatgggcccagctgctgtggctgcagcctgtgaatgccttccaagaggccagatgcctggacacatctctcagcagctacttttcctttaagggggatgataactccctggc

SEQ ID NO: 6862 - DNA, 420 bp, Homo sapiens
  misc_feature 1..420: note = U/M: U (0.37:0.83) in Colon + Heart Fibroblasts
  misc_feature 1..420: note = source = chr5:39380163-39380582; Gene: DAB2 (intron)
  source 1..420: mol_type = genomic DNA
cgctgcagacattgcattgcaagcactctggtcttctgtgagggaagggtaccaaccagctccacttgggggtgcaaggaaaagagcaacgcagaaagggggaagcccccaagagacatgaagtctttagagagagcctcttgatggggtaaatgcgagcagagacctgggacaagctggcttttcataccctcacggatttctgccactcagcagttgagtaacagtcctcctctggccaccctattctagatatgattaaacagatttcttgtaaaagaaccaaactattttcctttgtaggaaaacaacagagacagagaggaaaacaaaacaaggatcctgatgactgactgcaggaggcagagaaagccaggatccctggtcagattttaccgaaggagaggagagtccttcctc

SEQ ID NO: 6863 - DNA, 129 bp, Homo sapiens
  misc_feature 1..129: note = U/M: U (0.35:0.8) in Colon + Heart Fibroblasts
  misc_feature 1..129: note = source = chrX:68415027-68415155; Gene: PJA1 (Intergenic)
  source 1..129: mol_type = genomic DNA
cgctgagtggcggcccaccctggagacatcagcccagctatcacacggcttcctctgctgaggattagcacaaacatcccccagctgtggccctccctgctggccagctgtgcaggctttgggtggcgc

SEQ ID NO: 6864 - DNA, 63 bp, Homo sapiens
  misc_feature 1..63: note = U/M: U (0.28:0.88) in Colon + Heart Fibroblasts
  misc_feature 1..63: note = source = chr14:96701161-96701223; Gene: BDKRB2 (intron)
  source 1..63: mol_type = genomic DNA
cgaggaaacgctggacacgtcccccatgactgagctgtgaggacctgacttatctgtgcggcg

SEQ ID NO: 6865 - DNA, 107 bp, Homo sapiens
  misc_feature 1..107: note = U/M: U (0.36:0.88) in Colon + Heart Fibroblasts
  misc_feature 1..107: note = source = chr2:33453062-33453168; Gene: LTBP1 (intron)
  source 1..107: mol_type = genomic DNA
cggggtttcactgtgttggccaggaatgtcttgatctcctgacctcgtgatccgcccgcctcggcctcccaaagtgctgggattacaggcatgagccaccacgcccg

SEQ ID NO: 6866 - DNA, 230 bp, Homo sapiens
  misc_feature 1..230: note = U/M: U (0.38:0.88) in Colon + Heart Fibroblasts
  misc_feature 1..230: note = source = chr10:34370079-34370308; Gene: LINC00838 (Intergenic)
  source 1..230: mol_type = genomic DNA
cgcctccgtgttctggtcttgacctctggattgcaggccgtctttctgttacactactgattcttcctgccaagggatggttgagttactttcccaaacatctctaacttgggttttgggacccacatgccaaatttcaaaaggaaccctcagcccgggaatatgtgattgcaaacatcgactttccattttctgattttctctgttagcagatttcccagtaagcatcg

SEQ ID NO: 6867 - DNA, 182 bp, Homo sapiens
  misc_feature 1..182: note = U/M: U (0.32:0.79) in Colon + Heart Fibroblasts
  misc_feature 1..182: note = source = chr3:10997594-10997775; Gene: SLC6A1 (Intergenic)
  source 1..182: mol_type = genomic DNA
cggcatgcagagagcagcatctgggagagaggaaactgtgagtggaaattcctcggcaggacacagcaacagggggctgaagtgcagaaaggagaccggggtgacaggagggttttgagtcggggagaggcacgacagagctcagacagttgggcagggccagtgatgggtcaaggcgcacg

SEQ ID NO: 6868 - DNA, 59 bp, Homo sapiens; identical to SEQ ID NO: 5090
  misc_feature 1..59: note = U/M: U (0.39:0.85) in Colon + Heart Fibroblasts
  misc_feature 1..59: note = source = chr20:59234431-59234489; Gene: MIR4533 (Intergenic)
  source 1..59: mol_type = genomic DNA

SEQ ID NO: 6869 - DNA, 118 bp, Homo sapiens
  misc_feature 1..118: note = U/M: U (0.43:0.8) in Colon + Heart Fibroblasts
  misc_feature 1..118: note = source = chr5:3269626-3269743; Gene: LOC285577 (Intergenic)
  source 1..118: mol_type = genomic DNA
cggagggtgagtgtccatcctgtttctcactgcttctctcctaatcccctctaatgagggtttatgttaacacggataagccctcgcggtgtgcactaccaggctggctgggcccacg

SEQ ID NO: 6870 - DNA, 223 bp, Homo sapiens
  misc_feature 1..223: note = U/M: U (0.24:0.87) in Colon + Heart Fibroblasts
  misc_feature 1..223: note = source = chr5:38059911-38060133; Gene: GDNF (Intergenic)
  source 1..223: mol_type = genomic DNA
cgtaaccccccaacttcttgtttcacatctgtctacagggctaatctctttggtcctttcaagattagaactagaagggtatttggtatagcgctagtgagtttaatttcacctctggattcaacttcagaaacgctctggaatgtaagcagcacaagggttggggagctctctctactttccagctctgccccaactgccactgattccgcaaaattcccac

SEQ ID NO: 6871 - DNA, 275 bp, Homo sapiens
  misc_feature 1..275: note = U/M: U (0.3:0.84) in Colon + Heart Fibroblasts
  misc_feature 1..275: note = source = chr21:46994499-46994773; Gene: SLC19A1 (Intergenic)
  source 1..275: mol_type = genomic DNA
cgtgcttctttttcacaatgttaaactgatcttggggggaagctgcagactccctgctgtgccctcctgagagagtggtgaacagtcccaagttttagattccatcctttttcccgagagtgggggaaatccactaactgcccagcgcttcttatggggaccagggcctgaggaggacttggcgctgttcttgggcccggggctgtgggtggccagctggctgcagctgtgtgggccgggaggacctccctgaactctgtgctccctgggggtgc

SEQ ID NO: 6872 - DNA, 157 bp, Homo sapiens
  misc_feature 1..157: note = U/M: U (0.34:0.87) in Colon + Heart Fibroblasts
  misc_feature 1..157: note = source = chr7:134136965-134137121; Gene: AKR1B1 (intron)
  source 1..157: mol_type = genomic DNA
cgctctcttttcatgcatggcttctgataccggcagtcgcttgttttcaagcggttctgggagattatcatgaagttaagcacatcactgatgtttattcaaaggcccatgtgtcaattctcactgtatgaggatctgcttcaaggggtggagacac

SEQ ID NO: 6873 - DNA, 309 bp, Homo sapiens
  misc_feature 1..309: note = U/M: U (0.24:0.89) in Colon + Heart Fibroblasts
  misc_feature 1..309: note = source = chr14:39474369-39474677; Gene: LINC00639 (Intergenic)
  source 1..309: mol_type = genomic DNA
cggtaaacgaaatcctagatatggaatacagctgctatctcagcagctggatccagcttgggatgtgcttgtgtccagcggagcccacggcagccttatgaaagccctcctgagcctgtttctagaatctcctctgagaccataagaaactgcccagagcttagcccttcagccccactgacaggctgggccagtctccaccaagtccaggctccaccaaggcctggattctggctctttcactcagtcattcatctgtccctgagtcttccagagaaagaagtctgccgagtgtccagagcagacagc

SEQ ID NO: 6874 - DNA, 154 bp, Homo sapiens
  misc_feature 1..154: note = U/M: U (0.24:0.88) in Colon + Heart Fibroblasts
  misc_feature 1..154: note = source = chr6:14865486-14865639; Gene: JARID2 (Intergenic)
  source 1..154: mol_type = genomic DNA
cgacggcatcattttggacattctggcttaaaataattgctctttcccccaccccgtttttttaaaaaaatgagaaaagccatatgtttcttgtgaaaagttgggaaaaaatatttctaatcgccatggtcacaccgtccaaaaagcaaccacc

SEQ ID NO: 6875 - DNA, 232 bp, Homo sapiens
  misc_feature 1..232: note = U/M: U (0.28:0.85) in Colon + Heart Fibroblasts
  misc_feature 1..232: note = source = chr20:31198437-31198668; Gene: LOC149950 (Intergenic)
  source 1..232: mol_type = genomic DNA
cgagtgagcgggtgcccggaagtggctcgggacccttgcccgcccagtgcagtggcaggctgtgggccccttacccactggctcactgtggagcccctggccctggacttgagttcctgagctagcagaggagtcagctggggccactttggcctttgcttcatgagtgagcctggctacagagccccccgtgaatcctggagcagggcagacaccagcagcactgggcacc

SEQ ID NO: 6876 - DNA, 190 bp, Homo sapiens
  misc_feature 1..190: note = U/M: U (0.31:0.87) in Colon + Heart Fibroblasts
  misc_feature 1..190: note = source = chr1:54818464-54818653; Gene: SSBP3 (intron)
  source 1..190: mol_type = genomic DNA
cggaaacttcaatctgagagtaaactgtcatgtttttcccactctaaaacaggatgactaatgacagaggaacctcaacacaatccatggggctcaagccagatccctctcaacagagcacaaaagccacccagtcccaaaaaatgtgagccgacgccgggcccctcaacggattctgaatggcaaaccc

SEQ ID NO: 6877 - DNA, 78 bp, Homo sapiens
  misc_feature 1..78: note = U/M: U (0.32:0.88) in Colon + Heart Fibroblasts
  misc_feature 1..78: note = source = chr1:235973132-235973209; Gene: LYST (exon)
  source 1..78: mol_type = genomic DNA
cgaaagagcatcctttgaatcaaagccaccggttcttcggtccaacctgcagaaactactcgactctccaagttgtcg

SEQ ID NO: 6878 - DNA, 258 bp, Homo sapiens
  misc_feature 1..258: note = U/M: U (0.39:0.85) in Colon + Heart Fibroblasts
  misc_feature 1..258: note = source = chr7:4119888-4120145; Gene: SDK1 (intron)
  source 1..258: mol_type = genomic DNA
cgactccagctgtgcaagtgctggagcacgcaggggtccgggacagtgccaggcttgaataggatcatgctggcattggtgaagccgtgcaatctgccacttccatgttccaataaaagcaggaggaaaaagataaagggccaaattatgaggagtagtaaagtttcaaaatagttattatctgtagtaaaatccttgtggttttcatgactgtacttatgctatactgcaagacgatccactcctggaaattggccg

SEQ ID NO: 6879 - DNA, 87 bp, Homo sapiens
  misc_feature 1..87: note = U/M: M (0.65:0.16) in Colon + Heart Fibroblasts
  misc_feature 1..87: note = source = chr9:137393746-137393832; Gene: MIR4669 (Intergenic)
  source 1..87: mol_type = genomic DNA
cgaggcgagggggctgctgggaggttttggtcctgcagactcgagagtcgctgggaggagaggaaagtatgtcggccccaggtcccg

SEQ ID NO: 6880 - DNA, 125 bp, Homo sapiens
  misc_feature 1..125: note = U/M: M (0.71:0.24) in Colon + Heart Fibroblasts
  misc_feature 1..125: note = source = chr4:174437547-174437671; Gene: HAND2 (Intergenic)
  source 1..125: mol_type = genomic DNA
cgagaagaactggagcaatgattattttcctccttttttgattttctgtttctaaagaaagcactggtatcaaggacgagttaggtaatgcgtattaaaaggcaagcaggtcgctctcgtttacg

SEQ ID NO: 6881 - DNA, 56 bp, Homo sapiens
  misc_feature 1..56: note = U/M: M (0.72:0.29) in Colon + Heart Fibroblasts
  misc_feature 1..56: note = source = chr6:32063895-32063950; Gene: TNXB (intron)
  source 1..56: mol_type = genomic DNA
cgtcctcgcacacacaccgcccatctaggcactggccgcggcctcggcagcccccg

SEQ ID NO: 6882 - DNA, 193 bp, Homo sapiens; identical to SEQ ID NO: 738
  misc_feature 1..193: note = U/M: M (0.58:0.15) in Colon + Heart Fibroblasts
  misc_feature 1..193: note = source = chr3:134094044-134094236; Gene: AMOTL2 (promoter-TSS)
  source 1..193: mol_type = genomic DNA

SEQ ID NO: 6883 - DNA, 317 bp, Homo sapiens
  misc_feature 1..317: note = U/M: M (0.62:0.21) in Colon + Heart Fibroblasts
  misc_feature 1..317: note = source = chr1:1289240-1289556; Gene: MXRA8 (intron)
  source 1..317: mol_type = genomic DNA
cgatgtacttggcaggcagggggctgtgggccagctccgccctctccttcaggatgttgtttttgtaatctgtgggaggagaggaggctgaggtccccgctcccaggatgcacttcccagcccgggactgggagccgcgcctgtgccctcgtgtcccagcactgcctcacctagctggatgtcctcactcctgtaaagcatctggtcccctgcagccacagcgaactccgccaagttaacatccttcctggatggcgagggtgggaggaggttacagctgggtggggtgaagggggccctggtccccaggagggccg

SEQ ID NO: 6884 - DNA, 54 bp, Homo sapiens; identical to SEQ ID NO: 5202
  misc_feature 1..54: note = U/M: M (0.63:0.25) in Colon + Heart Fibroblasts
  misc_feature 1..54: note = source = chr6:32064206-32064259; Gene: TNXB (intron)
  source 1..54: mol_type = genomic DNA

SEQ ID NO: 6885 - DNA, 228 bp, Homo sapiens
  misc_feature 1..228: note = U/M: M (0.6:0.23) in Colon + Heart Fibroblasts
  misc_feature 1..228: note = source = chr9:137393398-137393625; Gene: MIR4669 (Intergenic)
  source 1..228: mol_type = genomic DNA
cgccttctggggatccccctggcccacccaggccaggcggccaggcagggcatgggctccagaactcttagcgtggttttcaatcacagtcgggctaagtgtatcagggctgcgtgcagggctcggagcggggggagtgtgtccctagcgaagggctcttctcccacccgcccctcacccctgctgagtctccctccctacccctgtggggcaacttgggtgggcccg

SEQ ID NO: 6886 - DNA, 61 bp, Homo sapiens; identical to SEQ ID NO: 737
  misc_feature 1..61: note = U/M: M (0.55:0.19) in Colon + Heart Fibroblasts
  misc_feature 1..61: note = source = chr1:233751029-233751089; Gene: KCNK1 (intron)
  source 1..61: mol_type = genomic DNA

SEQ ID NO: 6887 - DNA, 39 bp, Homo sapiens; identical to SEQ ID NO: 5204
  misc_feature 1..39: note = U/M: M (0.62:0.28) in Colon + Heart Fibroblasts
  misc_feature 1..39: note = source = chr6:32064082-32064120; Gene: TNXB (intron)
  source 1..39: mol_type = genomic DNA

SEQ ID NO: 6888 - DNA, 113 bp, Homo sapiens
  misc_feature 1..113: note = U/M: M (0.57:0.23) in Colon + Heart Fibroblasts
  misc_feature 1..113: note = source = chr22:45148085-45148197; Gene: ARHGAP8 (promoter-TSS)
  source 1..113: mol_type = genomic DNA
cgacagcgcgagactccgtctcaaaataaataaataaatacatacatacataaagtaaaataatgaataaataaaataagaaatggggaaatggatcagcaagaaagtgcccg

SEQ ID NO: 6889 - DNA, 141 bp, Homo sapiens; identical to SEQ ID NO: 5201
  misc_feature 1..141: note = U/M: M (0.53:0.2) in Colon + Heart Fibroblasts
  misc_feature 1..141: note = source = chr2:220406860-220407000; Gene: CHPF (intron)
  source 1..141: mol_type = genomic DNA

SEQ ID NO: 6890 - DNA, 252 bp, Homo sapiens
  misc_feature 1..252: note = U/M: M (0.56:0.23) in Colon + Heart Fibroblasts
  misc_feature 1..252: note = source = chr14:95757675-95757926; Gene: CLMN (intron)
  source 1..252: mol_type = genomic DNA
cgcccacatggagccgcatccctgcagctcctgcgtctcggggctggctaatacctgggaccgcatgctgcctgtgccaaaaaaacccagacacacatcctcctggaaatatcattggccacaggagctgtttctcatccccagagctccaggttgcaggtgcggctggggattatcacttctgcaaataaacaccaagcccaggtgaaagctccaggagagacggagtcagactggccccagcaaacctcg

SEQ ID NO: 6891 - DNA, 316 bp, Homo sapiens
  misc_feature 1..316: note = U/M: M (0.62:0.13) in Colon + Heart Fibroblasts
  misc_feature 1..316: note = source = chr21:46331292-46331607; Gene: ITGB2 (intron)
  source 1..316: mol_type = genomic DNA
cggtgtgtgcactctgccccagtgtgccccaggtcctccgtgagcagagcctgtgcttggaggagagctgggcttggccctgtctctctgtggcagaaacatagccaggaagagaaagctggctggatgcccgcgggtgccaggctgtgtgccaggaagagaaagctggcttgatgcccgcgggtgccaagctgtgtgctaggcctgcccaggagccctgcagtccctgccaggtgggaaaaaaagtcacctgacttgcccaagccaccagttgccggggtcctgcccttttgtttccagatacacacccaccccg

SEQ ID NO: 6892 - DNA, 178 bp, Homo sapiens
  misc_feature 1..178: note = U/M: M (0.6:0.16) in Colon + Heart Fibroblasts
  misc_feature 1..178: note = source = chr8:102505384-102505561; Gene: GRHL2 (intron)
  source 1..178: mol_type = genomic DNA
cgatctggcgtttagggccatttggaagttcagctgagttccttcgatttgtccaaagggcctactggaaaagtggggcttggccgcttttgtgtgaccgcaacaaagagcttttatatgaggcagaaacggccatcttctcgcaccgggcaggagggtgggcgtgagtgcgcgcccg

SEQ ID NO: 6893 - DNA, 247 bp, Homo sapiens
  misc_feature 1..247: note = U/M: M (0.57:0.15) in Colon + Heart Fibroblasts
  misc_feature 1..247: note = source = chr19:31847840-31848086; Gene: TSHZ3 (Intergenic)
  source 1..247: mol_type = genomic DNA
cgaagctgccaataaaaccctttaagtggcttgtgattcagtgcctggagttgcggggatggcattggtaaatgactctaatgcccaaagaaaaatattacaaatgccgctgtctcggccaccaatcgggcgccgctttcctgcgcgggcgatggctcctctctggcgcggagggcacccacatttgcatgataaattgaccagactggcggcagccaatgaaatattcaaattaggctgggtggcg

SEQ ID NO: 6894 - DNA, 263 bp, Homo sapiens
  misc_feature 1..263: note = U/M: M (0.59:0.17) in Colon + Heart Fibroblasts
  misc_feature 1..263: note = source = chr22:29400655-29400917; Gene: ZNRF3 (intron)
  source 1..263: mol_type = genomic DNA
cgccctcccccagtggcttcccctggatcaccttggcagggcctcatcctgaggagggtgggtggaggagggaggagggcgggtggcggctgcagtggcggctcctttgatcacctcccgcccggttccagtccctgctgccagcaggccagccaaaggcccgactctactgatctgatgaggtgctgaataggacccgaagggcagggacagagcaagaagaaagcttcgggaatgaaaaggaaaccccgtgaacctgctcg

SEQ ID NO: 6895 - DNA, 138 bp, Homo sapiens
  misc_feature 1..138: note = U/M: M (0.61:0.21) in Colon + Heart Fibroblasts
  misc_feature 1..138: note = source = chr14:100126575-100126712; Gene: HHIPL1 (exon)
  source 1..138: mol_type = genomic DNA
cgccgctggctcaccgaagcttctctccctcccaccccgcagatgacttgctgccgattttcgcctacccgcacacggttggcaagtcggtcacagggggctacgtgtaccggggctgcgagtaccccaacctgaacg

SEQ ID NO: 6896 - DNA, 250 bp, Homo sapiens
  misc_feature 1..250: note = U/M: M (0.53:0.18) in Colon + Heart Fibroblasts
  misc_feature 1..250: note = source = chr5:122422278-122422527; Gene: PRDM6 (Intergenic)
  source 1..250: mol_type = genomic DNA
cgggtgaggatgccgagctctgcgggcatcccggaagccgcggtggaggcaggggccccgctcggcgcagtgggcctgctggggaggtgcaggggaggtcctgactcctggtctattcccttccagactttttcgttcgctcccggaccttcagggctctccctcaaactttctcctgcccccttcacgggaggttcctgtagcctctgggccttagggtcccgtaagcctcgggatcgacttgtgcccg

SEQ ID NO: 6897 - DNA, 338 bp, Homo sapiens; identical to SEQ ID NO: 5215
  misc_feature 1..338: note = U/M: M (0.56:0.21) in Colon + Heart Fibroblasts
  misc_feature 1..338: note = source = chr19:10077107-10077444; Gene: COL5A3,COL5A3 (exon,intron)
  source 1..338: mol_type = genomic DNA

SEQ ID NO: 6898 - DNA, 62 bp, Homo sapiens
  misc_feature 1..62: note = U/M: M (0.53:0.22) in Colon + Heart Fibroblasts
  misc_feature 1..62: note = source = chr5:122434244-122434305; Gene: PRDM6 (intron)
  source 1..62: mol_type = genomic DNA
cgagtggagggatactgggcgcccactaccgcccggcccggagggtgggggtccctctcgcg

SEQ ID NO: 6899 - DNA, 59 bp, Homo sapiens
  misc_feature 1..59: note = U/M: U (0.21:0.89) in Cardiomyocytes + Skeletal + Smooth muscle cells
  misc_feature 1..59: note = source = chr13:103353210-103353268; Gene: METTL21C (Intergenic)
  source 1..59: mol_type = genomic DNA
cgactcccagccaggagcagatgcctccaacgctgtccgttctttccatagcgccgtcc

SEQ ID NO: 6900 - DNA, 161 bp, Homo sapiens
  misc_feature 1..161: note = U/M: U (0.19:0.85) in Cardiomyocytes + Skeletal + Smooth muscle cells
  misc_feature 1..161: note = source = chr7:139596699-139596859; Gene: TBXAS1 (intron)
  source 1..161: mol_type = genomic DNA
cgacacagtcagcttctgttttacaaaggtgattggccttggcgggagggttggtttggagacagagagcttcactgggagctcctcagtggtccaggcgagagagacagggcctgaagccagttggcattagacgttggagctggaatacagcacactgc

SEQ ID NO: 6901 - DNA, 173 bp, Homo sapiens
  misc_feature 1..173: note = U/M: U (0.23:0.88) in Cardiomyocytes + Skeletal + Smooth muscle cells
  misc_feature 1..173: note = source = chr12:109182411-109182583; Gene: SSH1 (exon)
  source 1..173: mol_type = genomic DNA
cgctcttcagccgctctagctctttggtgtgcttgcggaccaagcctgccttctgcagctgaatgatggactcctggtgctgcatcaggtagctgttggttgtcggcttctcagattcattactgaacagaagcctcaggtccttggctggcttcatatctttcttgggtgac

SEQ ID NO: 6902 - DNA, 405 bp, Homo sapiens
  misc_feature 1..405: note = U/M: U (0.23:0.87) in Cardiomyocytes + Skeletal + Smooth muscle cells
  misc_feature 1..405: note = source = chr3:194577074-194577478; Gene: LOC100507391 (Intergenic)
  source 1..405: mol_type = genomic DNA
cggtgctgcctctctcaggggcctgacatagggcttggcaaacagtgagtatttaattttagtcctcctcattctatgtcataatgtgataggccatggactgaattattccacgtggtgcaagaaagtagccagttctgtcctggtctaagctgagccatccatgcctgggccacgagacctagaggagtcgggtgagccaagttaggtcctgggctggccgcctggctatcttgcttctcttgtaggataatggcagctgcctcatagtggaggttgtgacgattacgtgtggtaatgcagagaaagcaaggagcacagagtctggggcttagaaagtgcttgacaaatgctggtctccttgtctccagctctaaacaccagaggggcttgccaaagtggacc

SEQ ID NO: 6903 - DNA, 432 bp, Homo sapiens
  misc_feature 1..432: note = U/M: U (0.25:0.89) in Cardiomyocytes + Skeletal + Smooth muscle cells
  misc_feature 1..432: note = source = chr6:154931253-154931684; Gene: CNKSR3 (Intergenic)
  source 1..432: mol_type = genomic DNA
cgtatactcaaatcagtgtaagccttccaaattagtactcctggcaggcacacacttcattcaaccctgatgttactactctagataattttagaattgttcacttaaaattttttagcacttacaggatcagatccagacatgtaaaatgagaccttcgtgatcgaggcctccaactgtttcctctaaaccactttcctcgagacaaatgtcttcttgctggaaaccttcccccttctactcccattcctcatccatctaagaaattccaattcctccataaaatcctatcttcagagacacgttccctgaaaacccttttcttaccgtcatatcaccacctccctgagagagaattcatcattttttggtcctgcatttgttccctatttttacccttatcatgatgagctgtgtctacgtgtttatctc

SEQ ID NO: 6904 - DNA, 192 bp, Homo sapiens
  misc_feature 1..192: note = U/M: U (0.2:0.81) in Cardiomyocytes + Skeletal + Smooth muscle cells
  misc_feature 1..192: note = source = chr3:75428327-75428518; Gene: FAM86DP (Intergenic)
  source 1..192: mol_type = genomic DNA
cgagggttccccctgtcggggccctattgctgttgagaggatcaaggcagcagtcagggcccgagggttgtccagaagaaagcacaaagcatacccagcgctggtctgacagcaattaggggtgtgacagaaaccttctgtcatggaaccagagattggagaccgtgggaacacatccaaatccacatctcc

SEQ ID NO: 6905 - DNA, 161 bp, Homo sapiens
  misc_feature 1..161: note = U/M: U (0.26:0.85) in Cardiomyocytes + Skeletal + Smooth muscle cells
  misc_feature 1..161: note = source = chr1:6125551-6125711; Gene: KCNAB2 (intron)
  source 1..161: mol_type = genomic DNA
cgagaagcagctgctccccaagaccccctgagctgctgccccagaagagcagtcacagcggccctgcgcagccccccaggccatcacctccggctccacaagtgacaccagagagagccctcccttctccagtccaaggaaggcgggtgtgctcatcaccc

SEQ ID NO: 6906 - DNA, 205 bp, Homo sapiens
  misc_feature 1..205: note = U/M: U (0.25:0.82) in Cardiomyocytes + Skeletal + Smooth muscle cells
  misc_feature 1..205: note = source = chr1:208568164-208568368; Gene: PLXNA2 (Intergenic)
  source 1..205: mol_type = genomic DNA
cgttgaacaagatcgaatgtgactttgcaaaaatagaatgcttggtctctcctcttttcctctccactcgacaatgcaagataaattcactccacgggaaccttttgtgggttgtactgctcaggcaacttgcagttttctgggggaaagtcagctcacgctacatttatcaccccctgctgctggctacaattcaacccacttc

SEQ ID NO: 6907 - DNA, 262 bp, Homo sapiens
  misc_feature 1..262: note = U/M: U (0.33:0.82) in Cardiomyocytes + Skeletal + Smooth muscle cells
  misc_feature 1..262: note = source = chr12:94659279-94659540; Gene: PLXNC1 (intron)
  source 1..262: mol_type = genomic DNA
cgtcaaaggaaatgcaaagtactccctattcagcacttataattgcaatcagaatttctcaaatggctctgctctgggaagacaatgtgtgaagatatatttcaatcaaattgaggccgtcttattttagaatgataacacaagacaaattccaccacgttccccatgcaacgtgacgccctttattttcatggattagttacaaatgtttggtgtcatgcacttaatgtactgtgatctcatagatatttttagaggaacg

SEQ ID NO: 6908 - DNA, 152 bp, Homo sapiens
  misc_feature 1..152: note = U/M: U (0.2:0.85) in Cardiomyocytes + Skeletal + Smooth muscle cells
  misc_feature 1..152: note = source = chr3:14564094-14564245; Gene: GRIP2 (intron)
  source 1..152: mol_type = genomic DNA
cggggccgagctgggtcgatcagccaggacccaggagactgagtcacagacggctacagcagtggccaatcagcgtgcccccaaatctctcatagcaactcttagggaccattccacagacgggaaaaccaaggagcaggaaagggaagaac

SEQ ID NO: 6909 - DNA, 185 bp, Homo sapiens
  misc_feature 1..185: note = U/M: U (0.34:0.91) in Cardiomyocytes + Skeletal + Smooth muscle cells
  misc_feature 1..185: note = source = chr4:169561224-169561408; Gene: PALLD (intron)
  source 1..185: mol_type = genomic DNA
cgatgacctcacaattccttcaaactgtgcttccgttggtgcggccaactttcatgctcgtgtttcaagcgatagccgggcctcactggctcaagttcagcgtattatcctcatttggctggacactgcttagcctgtgtttgtgataatgattgtttcctccatgtagcatccagaacttttcc

SEQ ID NO: 6910 - DNA, 192 bp, Homo sapiens
  misc_feature 1..192: note = U/M: M (0.59:0.11) in Cardiomyocytes + Skeletal + Smooth muscle cells
  misc_feature 1..192: note = source = chr1:210407630-210407821; Gene: SERTAD4-AS1 (promoter-TSS)
  source 1..192: mol_type = genomic DNA
cgcaaccgccacacacacacacaccttgggcaccagggctcgggcatcggagcaccccttcgtgctctttaggcccagcacctgcagccccaaccacaggacccagcttcaagctcttggcctcgcggggctgcagctgagaaatgtacttcccagggcagacaggtgtactgcaggaacggcagaaaagcg

SEQ ID NO: 6911 - DNA, 134 bp, Homo sapiens
  misc_feature 1..134: note = U/M: M (0.59:0.16) in Cardiomyocytes + Skeletal + Smooth muscle cells
  misc_feature 1..134: note = source = chr1:109104511-109104644; Gene: FAM102B (intron)
  source 1..134: mol_type = genomic DNA
cgacgccaggcagttagactggcgctcctgggccagtggtgacacctggtggtcagggcacttgtctacggggcttccttcctacctcagttatgtttatttggcttacttcccacaagtcacttattctttcg

SEQ ID NO: 6912 - DNA, 157 bp, Homo sapiens
  misc_feature 1..157: note = U/M: U (0.21:0.87) in Skeletal + Smooth muscle cells
  misc_feature 1..157: note = source = chr17:65517833-65517989; Gene: PITPNC1 (intron)
  source 1..157: mol_type = genomic DNA
cgctgctttcccaaggaaaaagcaattggaattggtctcactgtagagttactctcgggcagaacttcgggataaggagcaactggagacggtcgactgtgaatgtgatgttcatgtgacattcatgttcattgaggaatgtgttctcattgagacc

SEQ ID NO: 6913 - DNA, 434 bp, Homo sapiens
  misc_feature 1..434: note = U/M: U (0.29:0.87) in Skeletal + Smooth muscle cells
  misc_feature 1..434: note = source = chr4:129315804-129316237; Gene: PGRMC2 (Intergenic)
  source 1..434: mol_type = genomic DNA
cgacttaactctctgagtggtccattttatctatggaaatctagtttcaagatgttctggcagcaaagaaactcaaagccagattaattgctaaattacaaacacgaagccacagtatttaaaagcaagcttcacacaaaataatgttttcatgttatttaaaagatatactccaagtctccgtttggagattggatggtttaatagatcctaacatgtacagagggaaaactacccatcagtacttggatactcttgtgaagctagagtcatatctgggcacagggaggatgaagtctctgtggccagtgctgagcgtggttgctggcaggttttggtaacagtgattcagaggctgctgttgatcactgggagatatctagaattaccgccaatgcctgacttcagggctcttggattggaaagactcaggc

SEQ ID NO: 6914 - DNA, 432 bp, Homo sapiens
  misc_feature 1..432: note = U/M: U (0.24:0.82) in Skeletal + Smooth muscle cells
  misc_feature 1..432: note = source = chr11:39346878-39347309; Gene: LRRC4C (Intergenic)
  source 1..432: mol_type = genomic DNA
cgtatgtgaacacaatacagcatttattttggaaattgcagaaaacatttttggctggggagtgatagtgactctttgcctctttctggatgaggactcacaaaccagtagatatttggcctataaaaaattatacatggttattagccatcacacttttcttgccatttattacgtttcaagcaaattaatgttaaattgtccgataaatttagatagcatgactcaaaacacatgtatcatttaagtaagaattgctcctaaaatttgtattaatacctgtaagcatatttatgaaaacaaaacaaacaaatgagtaattatggcttccaaaactgtgctcatggaagacttagattcctggaacagcttgcatgtttcgcctgtgacagctacatgaactggtgtcaagcatggggattgtcccttacc

SEQ ID NO: 6915 - DNA, 204 bp, Homo sapiens
  misc_feature 1..204: note = U/M: U (0.35:0.91) in Skeletal + Smooth muscle cells
  misc_feature 1..204: note = source = chr12:124611762-124611965; Gene: ZNF664-FAM101A (intron)
  source 1..204: mol_type = genomic DNA
cgcggcacaaactagttgcagctgtctctttcctaccccttcacttgcctcccaaaggtggatggaagcctcctggttaccaaatgaataagaagtggaaggtgaccgagggccatgaatgatcaaattaaaggaaatggcacatattcctcaagcggactccttgtgctgcagtgttggcgggacgagaagtgctgctttgcc

SEQ ID NO: 6916 - DNA, 217 bp, Homo sapiens
  misc_feature 1..217: note = U/M: U (0.33:0.88) in Skeletal + Smooth muscle cells
  misc_feature 1..217: note = source = chr7:36254259-36254475; Gene: EEPD1 (intron)
  source 1..217: mol_type = genomic DNA
cgtgtgttttaggaacattcccgggtgatgttcactaaacatggagaacctttatcttactccagaaatacaagccagcagttgttgcaacctaactagcgctggctgacattgacgcaggagcttcccagcaggaatggatgtttcttcccgccgccttcttggaagtgcttttgaagttgactccactcagaacctcctttggaattccctgagc

SEQ ID NO: 6917 - DNA, 388 bp, Homo sapiens
  misc_feature 1..388: note = U/M: U (0.35:0.9) in Skeletal + Smooth muscle cells
  misc_feature 1..388: note = source = chr12:65100782-65101169; Gene: GNS (Intergenic)
  source 1..388: mol_type = genomic DNA
cggaaacccagccagaatcttggcgtgctgcagctgctgaggggccactctcccaagctgcaactctccctcgcaccagcttttggaagttacagagacccactagagagaagactttggactcatgactggagccttccagccaagagtccattaaaatattttccaacatgtgctgagaacattttagcaaccattccaacaaagaagcttccatttggttttagtaacaatagctaggaaccagtgcttatttctattatttcagtatgtaatgtacatattttcccccactttggagacaatctgagcctctaccgctggacagctctgctctaccctgtagtaaaaagggctcactgctcgatgcaccggaagctgataccac

SEQ ID NO: 6918 - DNA, 148 bp, Homo sapiens
  misc_feature 1..148: note = U/M: U (0.28:0.83) in Skeletal + Smooth muscle cells
  misc_feature 1..148: note = source = chr17:80357575-80357722; Gene: OGFOD3 (intron)
  source 1..148: mol_type = genomic DNA
cgtgggatcaggcaggatctgtccctccgtgactggcttacttcactcaggggtcgcagcactcagcttccattccagaacccagctggggccacgccctgggggtgaaaggtgcagctgccaggacaccagctgcaaaggggagggc

SEQ ID NO: 6919 - DNA, 53 bp, Homo sapiens
  misc_feature 1..53: note = U/M: U (0.37:0.9) in Skeletal + Smooth muscle cells
  misc_feature 1..53: note = source = chrX:9644602-9644654; Gene: TBL1X (intron)
  source 1..53: mol_type = genomic DNA
cgagatccttctggtatttcttttggacgccgtccgaggcagcttcattttac

SEQ ID NO: 6920 - DNA, 386 bp, Homo sapiens
  misc_feature 1..386: note = U/M: U (0.34:0.87) in Skeletal + Smooth muscle cells
  misc_feature 1..386: note = source = chr8:77690804-77691189; Gene: ZFHX4 (intron)
  source 1..386: mol_type = genomic DNA
cggcagctcttaatctctcagaaatgaacatgttgttcccattaaagctttctttttatatcagtaccatacgcggtcctgcatgcggtgacatctttagcaggcatgcaggaggttatgaaactctaccttgggaggatctcacagtgaaatttttccccccagagtgagctttaatttcctttctcatgaccaaagcaatttggctttcatttaaaagtttctttgctgccagcagctaataagtgtaacaggactgtaaaacattctgagacaaaaaaagattaatagttttatttgagagagaccagtaatttaaaacataagacctagtcagggtccattatacaataattccaatgttaatgctactttgcaaaatgagc

SEQ ID NO: 6921 - DNA, 402 bp, Homo sapiens
  misc_feature 1..402: note = U/M: U (0.37:0.89) in Skeletal + Smooth muscle cells
  misc_feature 1..402: note = source = chr7:33540721-33541122; Gene: BBS9 (intron)
  source 1..402: mol_type = genomic DNA
cgctctccctcaaatttaagtcctagcagctggttggcctcatttctcagttccaggtgagcagcgagatcttctaggccttggtctcagagatctgaatcttgatgggtgtagtttttccagtctttttactatgttaattctgttaaattcatttggctcttgtggggaacacagtaaacttggctgttacgtgtaaaactaaattgagaacatggagagctgtttagtatttcatgctggccagtaggtcaggaagattttccttgggggtaatttacataaggaattgtttatcccatttctttccagtttctgtgaccatttggggatagcagactccttccacaatggcacaggaatatatccaatgagactgagacttagacgatgcttctgtcc

SEQ ID NO: 6922 - DNA, 100 bp, Homo sapiens
  misc_feature 1..100: note = U/M: U (0.27:0.78) in Skeletal + Smooth muscle cells
  misc_feature 1..100: note = source = chr7:139226844-139226943; Gene: CLEC2L (intron)
  source 1..100: mol_type = genomic DNA
cggggacccgtttgatccggacacgtgagctgaggcttcatcttctggctaccgagcttagactgagaaaggcctgactcaccccctggacacaactccc

SEQ ID NO: 6923 - DNA, 296 bp, Homo sapiens
  misc_feature 1..296: note = U/M: U (0.34:0.84) in Skeletal + Smooth muscle cells
  misc_feature 1..296: note = source = chr2:51530026-51530321; Gene: NRXN1 (Intergenic)
  source 1..296: mol_type = genomic DNA
cgtaaaattaatcatcacagtgctgtcaatatattaaatggaataaataaacattcatgacagtcccctcttccaaatcagctacatctgttagtatctaatatttaataataattctccattttaaaaagtcttagaaatgaaatattctgattgaacatttttgtattgttataggataggcccgtgaaggggcataaaagtaagtttgtccacactccgtcctagaaagcagatatacttcgattaaagtttggccaacttccacaatgttcccttagtattgcagcattgcc

SEQ ID NO: 6924 - DNA, 234 bp, Homo sapiens
  misc_feature 1..234: note = U/M: U (0.35:0.84) in Skeletal + Smooth muscle cells
  misc_feature 1..234: note = source = chr3:129817943-129818176; Gene: ALG1L2 (TTS)
  source 1..234: mol_type = genomic DNA
cgatgtcttattagagggcagattgtggttcctgatttggaatttaacattctccaaacattccagtccaatgaaagttttatccgctttcccatataaaaattcttcccacgagagtgatttgattctaacaatcccgttggagtcgtgtatgagtcctacagtgtgaggttcagcattgccatctccaagtgctctccatagggaaacagtttctggtcatgatgagcttcc

SEQ ID NO: 6925 - DNA, 422 bp, Homo sapiens
  misc_feature 1..422: note = U/M: U (0.36:0.85) in Skeletal + Smooth muscle cells
  misc_feature 1..422: note = source = chr1:183701573-183701994; Gene: RGL1 (intron)
  source 1..422: mol_type = genomic DNA
cgacacccaaccgagtgctcaagccctacattccatccacccctcatttgttagtatcaaaattgaggcatttcacaaacttggctatcgaatactgtatgtgtgtggaaaagggccagataaaatgggccaattagaacacagccacatctgtcaaaactctaacccttaaccttagtgaaaatataatctaggatcaaacacagaagccccgcagatgtacacaagtcatttaatgcagcccttggaaagactgtgatgaacagctggtgctattgtgaaggcctgatgagaaagccaggcttggttttgctacgaatatttgcaattttaaagaaaaaaaataggttctaattgagtaaccattgaatgtatcccagtaaggtccttcccataggctgagttgaaaatactctgactcc

SEQ ID NO: 6926 - DNA, 72 bp, Homo sapiens
  misc_feature 1..72: note = U/M: U (0.4:0.88) in Skeletal + Smooth muscle cells
  misc_feature 1..72: note = source = chr2:240228774-240228845; Gene: HDAC4 (intron)
  source 1..72: mol_type = genomic DNA
cgagtcgtccggatggcccatctcaggccacaccctccagctctgtgcctgccgtccatcctgggtgcccac

SEQ ID NO: 6927 - DNA, 122 bp, Homo sapiens
  misc_feature 1..122: note = U/M: U (0.38:0.86) in Skeletal + Smooth muscle cells
  misc_feature 1..122: note = source = chr11:132582808-132582929; Gene: OPCML (intron)
  source 1..122: mol_type = genomic DNA
cgctcttcatcactggagcaggcgatgctcaggcctctgtagcagtgggctgcgtttacacaaagttgacctctgctagccagggtgggctccgagggcgctttccacaccccaacacaggc

SEQ ID NO: 6928 - DNA, 204 bp, Homo sapiens
  misc_feature 1..204: note = U/M: U (0.34:0.8) in Skeletal + Smooth muscle cells
  misc_feature 1..204: note = source = chr1:114525871-114526074; Gene: OLFML3 (Intergenic)
  source 1..204: mol_type = genomic DNA
cgggaagggggcacagccttctccccaaagcacagccctccttcccgccccaggtggggtggctcagtcagggccctgtgagcctccctttatcttcttttcttttctcctcaggcagagctgctccagacgtaggttgatgaggatggggaaagaaagacagtgaagcacctcagaaaggcgctattatagggagaccggggc

SEQ ID NO: 6929 - DNA, 315 bp, Homo sapiens
  misc_feature 1..315: note = U/M: U (0.34:0.6) in Skeletal + Smooth muscle cells
  misc_feature 1..315: note = source = chr7:74245167-74245481; Gene: GTF2IRD2 (intron)
  source 1..315: mol_type = genomic DNA
cggaatagggtagggagtccagaaataaacccttgaccaaatatttagcatgcatgccaggtgcagatctcagctacttgggaggccaagacaggaggatcacttgagcccaggaatttatgaccagactgggtaatatagcaaaaccctgtctcaaaaaaaaaaaaaaaaaaaaagctgggcacgatgactcacgcctgtaatcccagcactttgggagctagaggcaggcggatcacctgaggtcaggagtctaagaccaggctggacagcatggggaaaccctgtctctactaaaaaatacaaaaattagcc

SEQ ID NO: 6930 - DNA, 216 bp, Homo sapiens
  misc_feature 1..216: note = U/M: U (0.28:0.81) in Skeletal + Smooth muscle cells
  misc_feature 1..216: note = source = chr7:68683058-68683273; Gene: AUTS2 (Intergenic)
  source 1..216: mol_type = genomic DNA
cgaggcagagtcatagagcgactaaccaaccaatactcaaatctggggaagttgggtgggcttactgatgtcgtcgctctcaccgcaggtctcacatagggcaggtttctgattcctgcctctgcacagatttctgcaatgcacggagttatggggccactctaggataatgaaatccacaaaagtgaaatcgtcacaaggaaaaacttagcatcg

SEQ ID NO: 6931 - DNA, 287 bp, Homo sapiens
  misc_feature 1..287: note = U/M: U (0.29:0.83) in Skeletal + Smooth muscle cells
  misc_feature 1..287: note = source = chr20:24763072-24763358; Gene: CST7 (Intergenic)
  source 1..287: mol_type = genomic DNA
cgtgtgactttgggcagcctctaacagagtctgcctcatcctgttgccagggtccatcagtccccctcttttggtccctcggagcaacctgatcaaaggctcgctgctggctcagacacatgagcatctttttttttggtccgcgtttgtttattttcccagaaatgttttgctctgcttcagatcaggaggctgggccactcatgttccattgcttggcaaagtcaaagggaaaaactctatctccccttggctttaatggattgaaatgaagttcacctacaatc

SEQ ID NO: 6932 - DNA, 218 bp, Homo sapiens; identical to SEQ ID NO: 5192
  misc_feature 1..218: note = U/M: M (0.69:0.15) in Skeletal + Smooth muscle cells
  misc_feature 1..218: note = source = chr8:26048065-26048282; Gene: PPP2R2A (Intergenic)
  source 1..218: mol_type = genomic DNA

SEQ ID NO: 6933 - DNA, 443 bp, Homo sapiens
  misc_feature 1..443: note = U/M: M (0.63:0.13) in Skeletal + Smooth muscle cells
  misc_feature 1..443: note = source = chr6:75794646-75795088; Gene: COL12A1 (exon)
  source 1..443: mol_type = genomic DNA
cggcatgttctctctttgcagcttttgttaacaaagtattttgcaagcatttcaagggcaaaggcaaaaatgtctacagactgcgtgcttggagctaggcttcctgcagaaacaaggttctctacaatcagaaagggtactcctggatgagcaacgctggaagaaacacctcagaaaagacgtacactgctctatctgacctgtaaatgagaatttcaacacctcccccaagcctcgcggcgcggcgcgtgatctctggttcactgcccgggtccgtggggcagggcgcgccgccagcgccggtggggctcaggaggctcctctgcaggctcgtctgcgccgtagtcctcgtattccgctgtccgctcgggctccaccggcacgatgaagggctcgcgctcaggcaggtaggccccgccctcgggcacgtaaggctctgtccg

SEQ ID NO: 6934 - DNA, 70 bp, Homo sapiens
  misc_feature 1..70: note = U/M: M (0.66:0.23) in Skeletal + Smooth muscle cells
  misc_feature 1..70: note = source = chr20:3654323-3654392; Gene: ADAM33,ADAM33 (intron,exon)
  source 1..70: mol_type = genomic DNA
cgtgaccaggcggggccgggaggtgaggccgccccacccgggacccgcgtccgggtcagaggcacccacg

SEQ ID NO: 6935 - DNA, 228 bp, Homo sapiens; identical to SEQ ID NO: 6885
  misc_feature 1..228: note = U/M: M (0.65:0.22) in Skeletal + Smooth muscle cells
  misc_feature 1..228: note = source = chr9:137393398-137393625; Gene: MIR4669 (Intergenic)
  source 1..228: mol_type = genomic DNA

SEQ ID NO: 6936 - DNA, 141 bp, Homo sapiens; identical to SEQ ID NO: 5201
  misc_feature 1..141: note = U/M: M (0.6:0.2) in Skeletal + Smooth muscle cells
  misc_feature 1..141: note = source = chr2:220406860-220407000; Gene: CHPF (intron)
  source 1..141: mol_type = genomic DNA

SEQ ID NO: 6937 - DNA, 141 bp, Homo sapiens
  misc_feature 1..141: note = U/M: M (0.72:0.13) in Skeletal + Smooth muscle cells
  misc_feature 1..141: note = source = chr20:3653191-3653331; Gene: ADAM33 (exon)
  source 1..141: mol_type = genomic DNA
cgcacgcagcagtccccgtgggcgcactgggcccccgggcgcagcgagcagttgtgagcaaagcagcagaggtcgcggcactcctgggaccagaaaggcaagaagggcccaggtgagggcgcagcgccccagacctgagcg

SEQ ID NO: 6938 - DNA, 422 bp, Homo sapiens; identical to SEQ ID NO: 5208
  misc_feature 1..422: note = U/M: M (0.62:0.1) in Skeletal + Smooth muscle cells
  misc_feature 1..422: note = source = chr20:3653350-3653771; Gene: ADAM33,ADAM33 (intron,exon)
  source 1..422: mol_type = genomic DNA

SEQ ID NO: 6939 - DNA, 78 bp, Homo sapiens; identical to SEQ ID NO: 5211
  misc_feature 1..78: note = U/M: M (0.64:0.21) in Skeletal + Smooth muscle cells
  misc_feature 1..78: note = source = chr20:3653926-3654003; Gene: ADAM33,ADAM33 (intron,exon)
  source 1..78: mol_type = genomic DNA

SEQ ID NO: 6940 - DNA, 50 bp, Homo sapiens
  misc_feature 1..50: note = U/M: U (0.04:0.95) in Heart Cardiomyocytes + Fibroblasts
  misc_feature 1..50: note = source = chr12:124692480-124692529; Gene: ZNF664-FAM101A (intron)
  source 1..50: mol_type = genomic DNA
cgacaacaacgcacggtgaaacgcagtgttgggaatcgcagatggaagcc

SEQ ID NO: 6941 - DNA, 48 bp, Homo sapiens
  misc_feature 1..48: note = U/M: U (0.09:0.94) in Heart Cardiomyocytes + Fibroblasts
  misc_feature 1..48: note = source = chr2:204995100-204995147; Gene: ICOS (Intergenic)
  source 1..48: mol_type = genomic DNA
cgtcgctttgcacatcctgacgcgatagggacatctctgtcattttgc

SEQ ID NO: 6942 - DNA, 110 bp, Homo sapiens
  misc_feature 1..110: note = U/M: U (0.09:0.93) in Heart Cardiomyocytes + Fibroblasts
  misc_feature 1..110: note = source = chr18:6143914-6144023; Gene: L3MBTL4 (intron)
  source 1..110: mol_type = genomic DNA
cggctgggcgcggtggctcacgcctgtaatcccagcattttgggaggccaagggtggcggatcacaaggtcaggagatcgagactatcctggctaacacggtgaaacccc

SEQ ID NO: 6943 - DNA, 54 bp, Homo sapiens
  misc_feature 1..54: note = U/M: U (0.06:0.89) in Heart Cardiomyocytes + Fibroblasts
  misc_feature 1..54: note = source = chr2:233839348-233839401; Gene: NGEF (exon)
  source 1..54: mol_type = genomic DNA
cgttccgttcggggttgtctctggccttggctttgcttttgcgtcttatggagc

SEQ ID NO: 6944 - DNA, 245 bp, Homo sapiens
  misc_feature 1..245: note = U/M: U (0.1:0.93) in Heart Cardiomyocytes + Fibroblasts
  misc_feature 1..245: note = source = chr13:30098260-30098504; Gene: SLC7A1 (exon)
  source 1..245: mol_type = genomic DNA
cggacatacctgtggtggcgatgcagtcaaagcccacgaaggcatagaagcaagtcgctgcccccgacaggacaccagagaacccgaagggcatgaatccaccaacaccgggcttcccttcttttgtgtcactagaaaaaagagccgcaaacaaatgtcacgtcactcgctgcgcagtctggcgtaaggagctgtgctcatctcctgatatgagcggaacctggcagtcagccctccctgttacc

SEQ ID NO: 6945 - DNA, 184 bp, Homo sapiens
  misc_feature 1..184: note = U/M: U (0.06:0.88) in Heart Cardiomyocytes + Fibroblasts
  misc_feature 1..184: note = source = chr10:52440841-52441024; Gene: SGMS1 (Intergenic)
  source 1..184: mol_type = genomic DNA
cgtgtgctcctgctcctcatgctccagggccctgaggctacgtccccaggggctgccttgctccagagtccccaggaagccggttaaatgctcagtcttggggccctggaacctgcactttaaccctcacccccaggtcattctgtgtgcacgctgtctcagtcagctcaggctctgccgtaac

SEQ ID NO: 6946 - DNA, 293 bp, Homo sapiens
  misc_feature 1..293: note = U/M: U (0.06:0.86) in Heart Cardiomyocytes + Fibroblasts
  misc_feature 1..293: note = source = chr11:116728737-116729029; Gene: SIK3 (exon)
  source 1..293: mol_type = genomic DNA
cgagcagtcctcctccatgctctctgaatgcatcagtgccggctggtgagcatacccgtggggcggggtgggtgaggaagcctgtgagacacattcttgtgccctgatttgtagcagatgctgggggctggtgtgatggtgataagagtcagcattttgataagataaagcctggcgctctgtcatgctctgtcccccaaggctgggagccagactccccgcatccccttggttcatgtgcctgaacagttcctggtattcttgctgttgctgctgttgctgctgctgctgcc

SEQ ID NO: 6947 - DNA, 357 bp, Homo sapiens
  misc_feature 1..357: note = U/M: U (0.08:0.88) in Heart Cardiomyocytes + Fibroblasts
  misc_feature 1..357: note = source = chr7:150489478-150489834; Gene: TMEM176B (intron)
  source 1..357: mol_type = genomic DNA
cgtagaatctggaagggcctagaactgctttggccacagtgaaagtgacactatacagtgacagggaagcccttagctggtctggcagcttctactttctgtctcctgaaatgcttgcaactagggtactccccattggaatccagtttctgtgctatgagaagcccaagccaagtggagaagccattgccggctcttgctgacagcccccgctgagctccggaccatgcaactacatcatctcagacctccagcctcggcgagcacttggataacttcacccccatctgactgtaactgcatgagaaaacccgtgagtgagaatggctcatctgaatccagccaactcacagcacc

SEQ ID NO: 6948 - DNA, 341 bp, Homo sapiens
  misc_feature 1..341: note = U/M: U (0.09:0.88) in Heart Cardiomyocytes + Fibroblasts
  misc_feature 1..341: note = source = chr1:205811634-205811974; Gene: PM20D1 (exon,intron)
  source 1..341: mol_type = genomic DNA
cgtagagaacaagccagatccctgtgtcttggctcagccactggctgggaataggtgagaataggcagagtgctggacagtactagggtccttttcttactctaaaggttacttttctgtccgtcttttgttcctagctgattaggagtatgtgatacttcttcccatacctcatttgccagttgctgcaatacagtcaccactgtcccgcttccaaatatgataggcattggtgtctgctccaatctggaagagaaacagagtcctcaagacttagcgaaccccagccaaagatcagtggcttgaagaggagaagaagggagataggaggaagtttcaac

SEQ ID NO: 6949 - DNA, 359 bp, Homo sapiens
  misc_feature 1..359: note = U/M: U (0.12:0.9) in Heart Cardiomyocytes + Fibroblasts
  misc_feature 1..359: note = source = chr8:36788587-36788945; Gene: KCNU1 (intron)
  source 1..359: mol_type = genomic DNA
cgtcgctcttgtctggaagaaaccggtgtaagctggggcttctgtccttacacgaaaccattttatcagacgttaatgtgagtctactcttctcagaattcagtttttcacttctttacctctctgagcttctgaaaatggtccaggctatttgggttcatagatgtcccatagcacagaaatgataacaataaaaataacaaaaaaagaatacaagtttatattattcatagagtattttacaaatcacagtgtgttaatatgttatatttatttttataataattatgggaagtagataaagaagttgttattatccccatcttctagataaataacctgaatctacagggagcatc

SEQ ID NO: 6950 - DNA, 203 bp, Homo sapiens
  misc_feature 1..203: note = U/M: U (0.15:0.91) in Heart Cardiomyocytes + Fibroblasts
  misc_feature 1..203: note = source = chr6:164265488-164265690; Gene: QKI (Intergenic)
  source 1..203: mol_type = genomic DNA
cgtaagtgaattaatcttttggctttaactccatgggctgcgtcctattctcggcggagctatacacttagtactgaatgagacaaaagatagggaagccctcttggctggcagccttaaaattaagtgaggattgtttttgtccctgtagagatgggaagaggagtctctgaatggctacgctttatgtacaaaaccaaacc

SEQ ID NO: 6951 - DNA, 227 bp, Homo sapiens
  misc_feature 1..227: note = U/M: U (0.11:0.86) in Heart Cardiomyocytes + Fibroblasts
  misc_feature 1..227: note = source = chr17:78846018-78846244; Gene: RPTOR (intron)
  source 1..227: mol_type = genomic DNA
cgaggaggtgccgttgaggggactccgggtgatgctttcgtcgtttggaaagtagcactgctgtgcagaatggcctctttttagccatcctcctagttccatgtggagccctcagaatgggttttactccgggcagattccaacacaccctcatgctatcccgggagaactgcggaccaggaaggcagaggccccttcctcccacccccatggaagccagaccacac

SEQ ID NO: 6952 - DNA, 407 bp, Homo sapiens
  misc_feature 1..407: note = U/M: U (0.17:0.92) in Heart Cardiomyocytes + Fibroblasts
  misc_feature 1..407: note = source = chr7:26654405-26654811; Gene: C7orf71 (Intergenic)
  source 1..407: mol_type = genomic DNA
cgccacgacccttctccctctcaattggcctctccctcaaaatgcgcatcacatctcacggcctctctctccatatctttcaacaccagctcagcacttgagtctcggaggcaactttgccagcaaatgagaatgtacaaattaaaatgtcatgtgattctattctttttttagctcactgcccaaaatttaaaagtatggcaatggctagtgctaaagagagtgtaagagaatagaaatctttatatttgggagtggaaatttaaacccgctataaccattttggatattaatttggtaacatttatttaaaattttttaaatgcacactttgacttagcaatcctgcttttcagtaactgtcttcaagtttgtaaatctgcatatctaagaatgtttgccgcgac

SEQ ID NO: 6953 - DNA, 144 bp, Homo sapiens
  misc_feature 1..144: note = U/M: U (0.12:0.85) in Heart Cardiomyocytes + Fibroblasts
  misc_feature 1..144: note = source = chr6:164526953-164527096; Gene: QKI (Intergenic)
  source 1..144: mol_type = genomic DNA
cggtctgtcatcggcaggcagaagtagaactcgtttggggccgtggtgagtcgatgctgtcgatttggttttgagttgaggtttagtttttctttgactacatagatggctatcctggatcatgaagccttcagaagtggagtc

SEQ ID NO: 6954 - DNA, 195 bp, Homo sapiens
  misc_feature 1..195: note = U/M: U (0.17:0.9) in Heart Cardiomyocytes + Fibroblasts
  misc_feature 1..195: note = source = chr1:44715613-44715807; Gene: ERI3 (intron)
  source 1..195: mol_type = genomic DNA
cgagctggatgggtttttttcccctctaaaaaggaaaaagggaaggaagggggaaaaaagaaggataatgtgtgtttactcaagcaaagaaaaaaatatttaagtgatgtcggggagaagattgcagtaactagtgaagaataacatcgtctactttgctgtcaaatcacacccgaatttcagtaatagattctc

SEQ ID NO: 6955 - DNA, 202 bp, Homo sapiens
  misc_feature 1..202: note = U/M: U (0.16:0.89) in Heart Cardiomyocytes + Fibroblasts
  misc_feature 1..202: note = source = chr16:4014051-4014252; Gene: ADCY9 (exon)
  source 1..202: mol_type = genomic DNA
cgcccctggagaggtggcgggtcagaattgtgacttcttcatgccggggagggcaatctgtatgtctctggggaggagtagtgatgatggggactgatgcggtgtgaaaacgagacagtgagatttgacagcggaaagcaaaatgcacagggacaacgggcaagactgacaaggagtgcaccctgggcctcatcagcgtccc

SEQ ID NO: 6956 - DNA, 155 bp, Homo sapiens
  misc_feature 1..155: note = U/M: U (0.21:0.93) in Heart Cardiomyocytes + Fibroblasts
  misc_feature 1..155: note = source = chr21:44738312-44738466; Gene: SIK1 (Intergenic)
  source 1..155: mol_type = genomic DNA
cgagggggaatgggaattgtatccagctaaaattaaggagttcatattatgacgtgctccgataagagtagggattcagactttccccatgtcccttcgttgcttcatgcctcttcacagtccttcatatcgatcctgccgtctcatggtccaac

SEQ ID NO: 6957 - DNA, 252 bp, Homo sapiens
  misc_feature 1..252: note = U/M: U (0.23:0.94) in Heart Cardiomyocytes + Fibroblasts
  misc_feature 1..252: note = source = chr6:106512194-106512445; Gene: PRDM1 (Intergenic)
  source 1..252: mol_type = genomic DNA
cgaaatccaggcctgttcacagggcagtcacagtgatcactcaggatcagtgagatgcttagccagcggggaaactgttgggcagtttaaaacacaggtggatgtttttgcaatgagtaaaagagccttgaagaggatttgccaaatgactcaaacctgatgttttgaggaccaccagaataattctactcctatgtgaaaggggagatgggaagcagtgcaagaatgagtacttgtcgtctgagggcgtgc

SEQ ID NO: 6958 - DNA, 445 bp, Homo sapiens
  misc_feature 1..445: note = U/M: U (0.22:0.91) in Heart Cardiomyocytes + Fibroblasts
  misc_feature 1..445: note = source = chr17:74694601-74695045; Gene: MXRA7 (intron)
  source 1..445: mol_type = genomic DNA
cgcaggctccactctctaaatccgtatttgcaactggatgaggcatgtcccaggaacttctgtccagaacctagtaacccaagtctcaaactgtccccctctcacttgtccagtttttcttggcagccacagcatctctgacaccttaacatggcctgggaatgttgattccaacctgacttccttcctttctgtttttttttttttttttttttttttttgagataagagtcttgctctgttgcccaggctgggatgcaatggtgggatctctgctcactgcaacctccgcctcccgggttcaagagattcttctgcctcagcctcccgagtagctggaattacatgtgcatgccagcatccccggctaatttttgtatttttagtagacagggtttcaccatgttggccaggctggtcttgaactcctgacttcaagtgatcc

SEQ ID NO: 6959 - DNA, 178 bp, Homo sapiens
  misc_feature 1..178: note = U/M: U (0.17:0.86) in Heart Cardiomyocytes + Fibroblasts
  misc_feature 1..178: note = source = chr4:3912014-3912191; Gene: FAM86EP (Intergenic)
  source 1..178: mol_type = genomic DNA
cgagggttccccctgtcggggccctatagcggttgagaggatcaaggcagcagtcagggcctgatggttgtccagaggaaagcacaaagcataccgagcgctggtctgacagcacttaggggtgtgacagaaactttctgtcatggaaccagagattggagaccgtgggaacacatcc

SEQ ID NO: 6960 - DNA, 39 bp, Homo sapiens
  misc_feature 1..39: note = U/M: U (0.1:0.92) in Heart Cardiomyocytes + Fibroblasts
  misc_feature 1..39: note = source = chr10:86919042-86919080; Gene: GRID1-AS1 (Intergenic)
  source 1..39: mol_type = genomic DNA
cgacgtgtcgcccaggctggagtgcaatggcgcgactcg

SEQ ID NO: 6961 - DNA, 117 bp, Homo sapiens
  misc_feature 1..117: note = U/M: U (0.04:0.86) in Heart Cardiomyocytes + Fibroblasts
  misc_feature 1..117: note = source = chr12:124692706-124692822; Gene: ZNF664-FAM101A (intron)
  source 1..117: mol_type = genomic DNA
cggccgggaactcttggctgcagacagttgcacagctcgttatcttgatgccaaaacaagaaccaaggacccttttccactaggagaactctcggcaagcaggacttgagacgagcg

SEQ ID NO: 6962 - DNA, 173 bp, Homo sapiens
  misc_feature 1..173: note = U/M: U (0.06:0.88) in Heart Cardiomyocytes + Fibroblasts
  misc_feature 1..173: note = source = chr4:183936178-183936350; Gene: FAM92A1P2 (Intergenic)
  source 1..173: mol_type = genomic DNA
cgtagtatatgatgacagaggctagacattctggcagaaccatcttagaaatgaaaatagacatattatcatttaaatttccaaggaaacttatagtactggtatattcaatctgagcgacacgttccctgtggataacgtcgaggcttcggtttctggaaatggaaatctcg

SEQ ID NO: 6963 - DNA, 213 bp, Homo sapiens
  misc_feature 1..213: note = U/M: U (0.04:0.86) in Heart Cardiomyocytes + Fibroblasts
  misc_feature 1..213: note = source = chr2:204994800-204995012; Gene: ICOS (Intergenic)
  source 1..213: mol_type = genomic DNA
cgcagcaggaacacagggccaatgagagctgctgggcccagatgccgacgccgactatggaaagtcacggaaggctcttctgttcctcagcgttccaatccaatttgcggaaactgtttatcaggtttctatgcagacaggatgtaaatatgtcactgaaatctgcaaatacgataatgaaaactgatatttgtaattgtatctgtgtggtcg

SEQ ID NO: 6964 - DNA, 44 bp, Homo sapiens
  misc_feature 1..44: note = U/M: U (0.06:0.87) in Heart Cardiomyocytes + Fibroblasts
  misc_feature 1..44: note = source = chr10:132942326-132942369; Gene: TCERG1L (intron)
  source 1..44: mol_type = genomic DNA
cgcacacgcaggcacacacgctcacacatacacacacgctcccg

SEQ ID NO: 6965 - DNA, 435 bp, Homo sapiens
  misc_feature 1..435: note = U/M: U (0.1:0.88) in Heart Cardiomyocytes + Fibroblasts
  misc_feature 1..435: note = source = chr8:61350445-61350879; Gene: RAB2A (Intergenic)
  source 1..435: mol_type = genomic DNA
cgcttttaacactaccccagtagtattcgagcacttccctgctatctcacatgaatagatatcctaggcttatcttatgtttcttgttccacacttggagccagcaatttctcaaaagagtgctggttccttttactagaaaatgttatttagggaacacaatctcaacactacaggcactcatcactactgggttgtcattgcttttagagctttcagttgacagagctaggaaatatgaagtttttttttctttctttttgagatggagtctcgctctgtcacccaggctggagtgcagtggcgtgatctccactcactgcaagctctgcctcccaggctcacaccattctcctgcctcagcctctggagtagctgggactacaggcatccaccaccacacccaactaattttttatatttttagtagagacg

SEQ ID NO: 6966 - DNA, 131 bp, Homo sapiens
  misc_feature 1..131: note = U/M: U (0.12:0.89) in Heart Cardiomyocytes + Fibroblasts
  misc_feature 1..131: note = source = chr3:64579929-64580059; Gene: ADAMTS9 (exon)
  source 1..131: mol_type = genomic DNA
cgtaccgagctccaagggccagtactccatgcagcgtcgtgtggacaagcatgtgtgttacactgctcacgatcgggaggtttatcaagaatttcacagctcaaatctggaaaccgttcaccgttggaccg

SEQ ID NO: 6967 - DNA, 325 bp, Homo sapiens
  misc_feature 1..325: note = U/M: U (0.12:0.89) in Heart Cardiomyocytes + Fibroblasts
  misc_feature 1..325: note = source = chr10:68943889-68944213; Gene: CTNNA3 (intron)
  source 1..325: mol_type = genomic DNA
cgctttggccaactttcttaaaacactcttataataagtagttatcattctttggcctcccagcaagttaacagacaaaatgtcttgagaatcccaaacactattaccatgacctttgctcttgactggtccaattttgcttcgactcgattacttccaactcttggtagccattgctttgactgtgctgtgccttagggatcgtagtggtaaagccatgttccatctccttttacatttctttggagagatgcttcaggatcttgatatcaattgtttaaaaaatttctattgaaagctctgctcttatctgcagcttctcccg

SEQ ID NO: 6968 - DNA, 86 bp, Homo sapiens
  misc_feature 1..86: note = U/M: U (0.13:0.89) in Heart Cardiomyocytes + Fibroblasts
  misc_feature 1..86: note = source = chr10:132941935-132942020; Gene: TCERG1L (intron)
  source 1..86: mol_type = genomic DNA
cgcgggcacgggtgggaacacaacacaccagcaccctccaaactgaagtgttggtaagatccccgagaaccgcatggcacggaacg

SEQ ID NO: 6969 - DNA, 177 bp, Homo sapiens
  misc_feature 1..177: note = U/M: U (0.07:0.83) in Heart Cardiomyocytes + Fibroblasts
  misc_feature 1..177: note = source = chr17:74365884-74366060; Gene: SPHK1 (Intergenic)
  source 1..177: mol_type = genomic DNA
cggcctgggtctcctggactgactactcctgggacattccctcctggagccctgccgccatgtcacacaaggggccacactctggccagcagccccagctgagctgacagctgacagccagcgcctgttatcatcgccatggtaaggagctgtctcagatgtttagccccgctgacg

SEQ ID NO: 6970 - DNA, 157 bp, Homo sapiens
  misc_feature 1..157: note = U/M: U (0.14:0.89) in Heart Cardiomyocytes + Fibroblasts
  misc_feature 1..157: note = source = chr6:74281208-74281364; Gene: EEF1A1 (Intergenic)
  source 1..157: mol_type = genomic DNA
cgcagtgtaataacagctgccctgagaagggacttccagccattcttgtgctctgagattgtgtccggaattggtgggttcttggtctcactgacttcaagaatgaagccgcagacacttgcggtgagtattacagttcttaaaggcagcgtgtccg

SEQ ID NO: 6971 - DNA, 429 bp, Homo sapiens
  misc_feature 1..429: note = U/M: U (0.15:0.89) in Heart Cardiomyocytes + Fibroblasts
  misc_feature 1..429: note = source = chr6:56485141-56485569; Gene: DST (exon)
  source 1..429: mol_type = genomic DNA
cggcagctcttttagcctcggcctctatggtgagctgcctcacccgctccagttctctttcagcggcttccttctctctcacaatggtttcaagttccctgcggtactgcttggcttcactttcagcccttatcttctgcagagagatatcttctacatttctctgctgctttctcaattcattttctgcagcctccctgaccttcggaagttcttcctctactcgggacttttgtttctttagttcagctaccattctttccaactcacttatctttcctgtaagtttgctattctcaagcactgttgccttctgacgctgaagcagatctgaatatgccccatgttcagaagtctccttacaccttttaatctacaaaagacattttgaaagtgtcaagcctgttctgttcaaaatatcttacaacg

SEQ ID NO: 6972 - DNA, 33 bp, Homo sapiens
  misc_feature 1..33: note = U/M: U (0.13:0.86) in Heart Cardiomyocytes + Fibroblasts
  misc_feature 1..33: note = source = chr1:30393725-30393757; Gene: MATN1-AS1 (Intergenic)
  source 1..33: mol_type = genomic DNA
cgccgagaacggctgaggctcagtgctcacgcg

SEQ ID NO: 6973 - DNA, 150 bp, Homo sapiens
  misc_feature 1..150: note = U/M: U (0.12:0.85) in Heart Cardiomyocytes + Fibroblasts
  misc_feature 1..150: note = source = chr8:57111069-57111218; Gene: PLAG1 (intron)
  source 1..150: mol_type = genomic DNA
cggagttctactgcactcagggccagcggtcctcatagacgttacaagacagtccagcaagatggctttctgcccggtcccctatctcgctccctctgcctccagcacgtagagctcctcctccagacctcagggcctctgtctggagcg

SEQ ID NO: 6974 - DNA, 293 bp, Homo sapiens
  misc_feature 1..293: note = U/M: U (0.13:0.86) in Heart Cardiomyocytes + Fibroblasts
  misc_feature 1..293: note = source = chr1:19383637-19383929; Gene: IFFO2 (Intergenic)
  source 1..293: mol_type = genomic DNA
cgcttgaacccgggaggcagaggttgcagtgagccaagattgagccactgcactccagcctgggtgagagagcgagactctgtctccaaaaaaaaaaaaagagagagagagaaagagatcgttatactcaaactggagagggttgtgaccaagcgatgaccagggggaggccagctgtcaagctgtcaacacgtgagcaagtagataagcacggtcctttcggagactgatgagtgctacagagacaatgaaacaagaccctaggatagagagggaaggggcgatattggacg

SEQ ID NO: 6975 - DNA, 58 bp, Homo sapiens
  misc_feature 1..58: note = U/M: U (0.15:0.87) in Heart Cardiomyocytes + Fibroblasts
  misc_feature 1..58: note = source = chr14:96351106-96351163; Gene: LINC00617 (intron)
  source 1..58: mol_type = genomic DNA
cgtccaaacactgcggtccccacaatctgtgtctgcgtggttgtatctccgactgccg

SEQ ID NO: 6976 - DNA, 155 bp, Homo sapiens
  misc_feature 1..155: note = U/M: U (0.19:0.91) in Heart Cardiomyocytes + Fibroblasts
  misc_feature 1..155: note = source = chr10:77495522-77495676; Gene: C10orf11 (Intergenic)
  source 1..155: mol_type = genomic DNA
cgctatcagctaccctctcagcaagatattcacgagtccacccgagtcgcctcagaagcagcatatcctaactcattttatctacggatcgtgtgtgagacacagagagtcagacacacactgttacttataaattttttttacatctttccacg

SEQ ID NO: 6977 - DNA, 175 bp, Homo sapiens
  misc_feature 1..175: note = U/M: U (0.15:0.87) in Heart Cardiomyocytes + Fibroblasts
  misc_feature 1..175: note = source = chr18:46268834-46269008; Gene: CTIF (intron)
  source 1..175: mol_type = genomic DNA
cgtagcaatgccagaggaggcaccttctgcattcgggcctccttggttcacacgcagacagcgagagcaccatgcccagagtcctgacttatcactgctgccatttcccgagtgagtgatgacagcagcagcgggatcaacttattgagccttgctctgtgtcagagccaaggcg

SEQ ID NO: 6978 - DNA, 198 bp, Homo sapiens
  misc_feature 1..198: note = U/M: U (0.15:0.87) in Heart Cardiomyocytes + Fibroblasts
  misc_feature 1..198: note = source = chr1:48231156-48231353; Gene: TRABD2B (exon)
  source 1..198: mol_type = genomic DNA
cggagaagccaaacccagacccaggaggcttcggtgatccaagagcaagccagtccagagccacagtccacaggaggtcactgatgtcccgggttcccctcccgggccagcactagggctagggggttataacacaggccacataagaatagttttatcggtagaataaatacatttttcttttttaatatggacacg

SEQ ID NO: 6979 - DNA, 204 bp, Homo sapiens
  misc_feature 1..204: note = U/M: U (0.12:0.84) in Heart Cardiomyocytes + Fibroblasts
  misc_feature 1..204: note = source = chr6:110733693-110733896; Gene: DDO (intron)
  source 1..204: mol_type = genomic DNA
cgggaactatagaatcacactttctggcctcctgctgagggtggagacatgtggcctgctctgccaatgagccatcatcagaagcgttgaaagtcgcttcctgtccagagtgtttaatcacagaggcgagaacctcagaggtcccctcccctccgcccctgggcacatgcgctgatgacaatcaggatgacagctgctccatcg

SEQ ID NO: 6980 - DNA, 175 bp, Homo sapiens
  misc_feature 1..175: note = U/M: U (0.17:0.88) in Heart Cardiomyocytes + Fibroblasts
  misc_feature 1..175: note = source = chr3:14598605-14598779; Gene: GRIP2 (Intergenic)
  source 1..175: mol_type = genomic DNA
cggagggttcccccacatgcagaactcctgccaatccccatcacttcgcagcaatcctatctctggaatcctttggcctagcattcaccagcacgcaggattcctaggacggatggaacacagggcagttctggatacacagatctgaccagtaataaaaatgaattacacagcg

SEQ ID NO: 6981 - DNA, 225 bp, Homo sapiens
  misc_feature 1..225: note = U/M: U (0.14:0.85) in Heart Cardiomyocytes + Fibroblasts
  misc_feature 1..225: note = source = chr17:41430132-41430356; Gene: LOC100130581 (Intergenic)
  source 1..225: mol_type = genomic DNA
cgctttggttcaaatgcctcggacatatctccccactccctttacaacaggacccttaatcctaagggttgcagcaagatgaagatctgtcttgtgtaacttcttcaggctgaattggggcaatgatattgctgcctaactattacagtctcttgcattcgggatagagaaaagctcagagagcgttgatatggtaaatgtcattcataactctgagttctgacg

SEQ ID NO: 6982 - DNA, 365 bp, Homo sapiens
  misc_feature 1..365: note = U/M: U (0.18:0.89) in Heart Cardiomyocytes + Fibroblasts
  misc_feature 1..365: note = source = chr13:74557243-74557607; Gene: KLF12 (intron)
  source 1..365: mol_type = genomic DNA
cgcaccctgtccctgtctaccatcactcctctcaccaaggaatccctttatctttgttcctggaagttcaagtgtacagggtttcctagtcctgtactatggctcaaccagaacgccaggcaaccaaccctggcacagtctaagacttaacatgcgattaaaaagccacttgctttccagccctgctgtacagaagctgccctatgccaccacctttcttggtgccagcatgattcaacttagtgatgtcagcacggacctttcactacccatcccattcttctctccagtatcagtgccttctggttcgtgaacctctgtctgaattaactacattcctgcttatcgggtgttctccagcaccg

SEQ ID NO: 6983 - DNA, 405 bp, Homo sapiens
  misc_feature 1..405: note = U/M: U (0.18:0.89) in Heart Cardiomyocytes + Fibroblasts
  misc_feature 1..405: note = source = chr5:107585052-107585456; Gene: FBXL17 (intron)
  source 1..405: mol_type = genomic DNA
cgcacattatttttaaacatgagaggaacaaaatattaaaagtgaaggctcgttttatttactatctggtcaaacaaatatactgcctcattctgtaccaacatattaatttatagaaacatatctaatcagtattacaaacagcatcacgcacattgatgataaattaagacaattctacatttaacttattcaaatagtgaagcttgttgctctgcaacctttgaaaggccatacacttgtataagagtacagcctacactgtaagaaaaagaaaaaggagttttgcaccccggccttcgggaatgttatcttctgggtttggcctcagttcatattccactgccccaaacaagatgctctaagaagcagtacagagctgagaactacaaaatataagcgacg

SEQ ID NO: 6984 - DNA, 148 bp, Homo sapiens
  misc_feature 1..148: note = U/M: U (0.16:0.86) in Heart Cardiomyocytes + Fibroblasts
  misc_feature 1..148: note = source = chr3:4714755-4714902; Gene: ITPR1 (exon)
  source 1..148: mol_type = genomic DNA
cgacccttcattcatcctgaatgatttctggagcgtgagctgtgtgcccttgttccttcctctagatatcagctgaacctctttgcgaggatgtgtctggaccgccaatacctggccatcaacgaaatctcaggccagctggatgtcg

SEQ ID NO: 6985 - DNA, 156 bp, Homo sapiens
  misc_feature 1..156: note = U/M: U (0.24:0.94) in Heart Cardiomyocytes + Fibroblasts
  misc_feature 1..156: note = source = chr10:78203058-78203213; Gene: C10orf11 (intron)
  source 1..156: mol_type = genomic DNA
cgttcaagttgggtaatagccatccttccattgactgatcatccactaccggctcttgactctggcatcacatcttcgagataatccgagctagagtttggctgtcatctagaattcacagttttagtttagcactttgctgactagtactttgcg

SEQ ID NO: 6986 - DNA, 158 bp, Homo sapiens
  misc_feature 1..158: note = U/M: U (0.16:0.86) in Heart Cardiomyocytes + Fibroblasts
  misc_feature 1..158: note = source = chr1:81845626-81845783; Gene: LPHN2 (Intergenic)
  source 1..158: mol_type = genomic DNA
cgccctcctctactcaacacttcccttcccctcttctgtatcatttaaacggacgtgtccttcccttcccagcactcccttatcagtaaaacctggccttctctggtgaattcatctctcgctttccctaacacgcaaaaaattctaagactcaaacg

SEQ ID NO: 6987 - DNA, 448 bp, Homo sapiens
  misc_feature 1..448: note = U/M: U (0.2:0.9) in Heart Cardiomyocytes + Fibroblasts
  misc_feature 1..448: note = source = chr5:147832067-147832514; Gene: HTR4 (intron)
  source 1..448: mol_type = genomic DNA
cggggatgctgatcagtgttgtacgatacatagcacagcctcccacaacaaagaattatctggcccaaaatgtcaacagtgccaggattgagaaaccctaatctagaataactagtccctttagctggctagaagcaggtgttgattgaagaacagggcctcagtgaagggcatgagtccgagttctcacagaaccgtccaccgcagctgttgttgagagagagctaagccaaggggatgtgacatacagaaccaaagcatctgctactacttgccagataggtcagtgttaagaagaataaaatgggaaaagagatagaaagggccagatcagccactattaactagggtggccaggaaatgtcccagtgagatatgcaagaccttagggaagctagagtcccagctagtgagtcgtagatgctcagcctccaaaccatgccttgcg

SEQ ID NO: 6988 - DNA, 399 bp, Homo sapiens
  misc_feature 1..399: note = U/M: U (0.22:0.91) in Heart Cardiomyocytes + Fibroblasts
  misc_feature 1..399: note = source = chr5:124133353-124133751; Gene: ZNF608 (Intergenic)
  source 1..399: mol_type = genomic DNA
cgctttccagctcccctttccactgagagctgctttcatcactcaataaagttttctgcattcaccgtccttcaattcatccacatgacctcattcttcttgggcaccagacaagaattcagaaccaccaaatgcggatactcaaaaaggctgtcacactggccctttgcccttgctggtggaggacagccaccccacgcaatgaggaaaaaggcttactgagctgataacactctgctgtttgtggacggcagagctaaaagagcattgtaatacacctctggggccttagggtcacccccacccggacgtcaccgcagggcctacacagagtttgcgtctgctgttgccaaagcagccagctggttcctgcgctccattacctacgtgctcccttcg

SEQ ID NO: 6989 - DNA, 61 bp, Homo sapiens
  misc_feature 1..61: note = U/M: U (0.17:0.85) in Heart Cardiomyocytes + Fibroblasts
  misc_feature 1..61: note = source = chr11:131369292-131369352; Gene: NTM (intron)
  source 1..61: mol_type = genomic DNA
cgccccccactccccgtcatctccgctgtccccagcccggtctgagccactttcctatccg

SEQ ID NO: 6990 - DNA, 93 bp, Homo sapiens
  misc_feature 1..93: note = U/M: U (0.26:0.94) in Heart Cardiomyocytes + Fibroblasts
  misc_feature 1..93: note = source = chr10:88973836-88973928; Gene: FAM22A (Intergenic)
  source 1..93: mol_type = genomic DNA
cgtgcaactgcgaggatggtcggctcccaaagcggaaccgcggtgctgggcgaagggtcagggctccgtggtgcggcagagcgcatgccagcg

SEQ ID NO: 6991 - DNA, 142 bp, Homo sapiens
  misc_feature 1..142: note = U/M: U (0.18:0.86) in Heart Cardiomyocytes + Fibroblasts
  misc_feature 1..142: note = source = chr5:136617762-136617903; Gene: SPOCK1 (intron)
  source 1..142: mol_type = genomic DNA
cgggttaacgggaggattatttgagacttacatgccaaacacccagcgcataggatgcaccaagaaatggtaactatattttgtagttgaccccagtatatcctctgccttacgctgataacagagttttaaaaatataccg

SEQ ID NO: 6992 - DNA, 220 bp, Homo sapiens
  misc_feature 1..220: note = U/M: U (0.17:0.85) in Heart Cardiomyocytes + Fibroblasts
  misc_feature 1..220: note = source = chr10:112444634-112444853; Gene: RBM20 (intron)
  source 1..220: mol_type = genomic DNA
cgccggccctgccctgccaccacgcacacacaaaatgtgaaggagacaagtaaagagaactgctggtgaaacagctggatgattgcggtggatcctaacatcttgagaagtgaatctgtttgcaaaagctttagcacaaggagagcgatctgcctgaattgcggtagagagtgttgtttgcgcatttgtaaaacgaggcgaatgacccagctgttggccg

SEQ ID NO: 6993 - DNA, 354 bp, Homo sapiens
  misc_feature 1..354: note = U/M: U (0.12:0.8) in Heart Cardiomyocytes + Fibroblasts
  misc_feature 1..354: note = source = chr4:182193747-182194100; Gene: LINC00290 (Intergenic)
  source 1..354: mol_type = genomic DNA
cgactgtcaatccaatggcagacaccacggataaagaggacgtcttgttggtctttccaattacatcaacatgcagctattgagaggaggtggcagtgctactaacatgatcccaacactggcctctatttctacttcttctagcaccttccactctttaatcttttgagcaatatctaaaacttcagtcactgcaaaatgtcatattcgggaatttgatttcatggatgacaccacattctgaacatagtgggagtatattctgtcatgtggccatgatggtactgtagcaaatgagaattgtcaacagatatgtcattgcagtagtataataaatagcatattggtggcccg

SEQ ID NO: 6994 - DNA, 59 bp, Homo sapiens
  misc_feature 1..59: note = U/M: U (0.22:0.89) in Heart Cardiomyocytes + Fibroblasts
  misc_feature 1..59: note = source = chr1:209815883-209815941; Gene: LAMB3 (intron)
  source 1..59: mol_type = genomic DNA
cgcgatctctgctcactgcaaccctctgcctcccaggctcaagcgattctcccgcctcg

SEQ ID NO: 6995 - DNA, 75 bp, Homo sapiens
  misc_feature 1..75: note = U/M: U (0.22:0.89) in Heart Cardiomyocytes + Fibroblasts
  misc_feature 1..75: note = source = chr5:1121519-1121593; Gene: SLC12A7 (Intergenic)
  source 1..75: mol_type = genomic DNA
cgacatcagcgcccgtgtgcggatccccctgcagccgagtcccaagcaggatcgtcaccctcacattcctctccg

SEQ ID NO: 6996 - DNA, 272 bp, Homo sapiens
  misc_feature 1..272: note = U/M: U (0.2:0.87) in Heart Cardiomyocytes + Fibroblasts
  misc_feature 1..272: note = source = chr2:202874350-202874621; Gene: FZD7 (Intergenic)
  source 1..272: mol_type = genomic DNA
cgttcccaccagtcttatagatcattactatatttctttggtgtcttccaaaatggcatgactaaattcagtaagtttattgagagaatgagcaaatgactcaagagtcagtattggctcctcgtgctacaacgtctagcacttaaacaactgtgcccttcacggtcatggacatctgtccttttggcctgctcagcttccatcccctctttttctagtaacagctcctcatttggctttggggaactatcgcttcctgttggatacaatcg

SEQ ID NO: 6997 - DNA, 339 bp, Homo sapiens
  misc_feature 1..339: note = U/M: U (0.18:0.85) in Heart Cardiomyocytes + Fibroblasts
  misc_feature 1..339: note = source = chr2:108429756-108430094; Gene: LOC729121 (Intergenic)
  source 1..339: mol_type = genomic DNA
cggagttcttaattcgttctcaaatgaagtgtttccaataggcagtcatcccagcttcctatgctcaccccactcagatgacctaagcaacatttaggttcaaccagaagaaagctggatttttgaagccttgtgagtaatgacagagtcccaggaaatatctcttgaggctctgttaggtataactattggcatattatgaagcacttcccatttttgataagggattatttagacgaggcgaagttaggattgaagttagcctacctaggccctcatgcatctctaatactgactgaggatgccatgagtgggccagatttgtggatgtgtgacccg

SEQ ID NO: 6998 - DNA, 489 bp, Homo sapiens
  misc_feature 1..489: note = U/M: U (0.2:0.87) in Heart Cardiomyocytes + Fibroblasts
  misc_feature 1..489: note = source = chr15:76052866-76053354; Gene: MIR4313,MIR4313 (Intergenic,TTS)
  source 1..489: mol_type = genomic DNA
cgttccctcttcattcctcaacacagagggcccctcacaaccctctcagcagatggtagagctccccacgcatcctcttaaagaggcttcaccgttgatggccacaagccccaccatgacctcctcccagggagtgaattttcttacatgtctcccaccagagcagggacaaaataaaacataaaagcagcagctgttaaattatcagcaacatttcctactaggatcaactcacggagtgggcagtgtattccattaggtggatcagtgcaggggttagcaagcgttttctgtaaagggccggatgggaactctttaaggctctgcaggccactgggtctctgtcaccacctactcaaaccctcccctgtagcaagaaagcagccctagcaacatgtcaacagataagcgtggccacattcccagaaacctttctttatggacatggaagtttgcatctcacgtaattctcatgtgtcacaagatacg

SEQ ID NO: 6999 - DNA, 44 bp, Homo sapiens
  misc_feature 1..44: note = U/M: U (0.22:0.88) in Heart Cardiomyocytes + Fibroblasts
  misc_feature 1..44: note = source = chr15:100472896-100472939; Gene: DNM1P46 (Intergenic)
  source 1..44: mol_type = genomic DNA
cggccacatgaccctggactggccggcgtggtggggtcggcacg

SEQ ID NO: 7000 - DNA, 152 bp, Homo sapiens
  misc_feature 1..152: note = U/M: U (0.26:0.92) in Heart Cardiomyocytes + Fibroblasts
  misc_feature 1..152: note = source = chr10:88973639-88973790; Gene: FAM22A (Intergenic)
  source 1..152: mol_type = genomic DNA
cgagcccaggcagccctgcaggcaaggaggagggagtgtgtcggaaggctgtatggccagagccgctgaccgggccaggacttctttgtcccctcttctctcctgcatatcagcactcacgtcctcctggctcgggctggcctggcagctcg

SEQ ID NO: 7001 - DNA, 62 bp, Homo sapiens
  misc_feature 1..62: note = U/M: U (0.24:0.89) in Heart Cardiomyocytes + Fibroblasts
  misc_feature 1..62: note = source = chr1:228556527-228556588; Gene: OBSCN (exon)
  source 1..62: mol_type = genomic DNA
cggctcccctgagttcgtctcccccgagatcatccagcagaaccctgtgagcgaagcctccg

SEQ ID NO: 7002 - DNA, 298 bp, Homo sapiens
  misc_feature 1..298: note = U/M: U (0.18:0.83) in Heart Cardiomyocytes + Fibroblasts
  misc_feature 1..298: note = source = chr1:13861838-13862135; Gene: LRRC38 (Intergenic)
  source 1..298: mol_type = genomic DNA
cgtaggaggggcaggcgttggccccagcacacccatggttgtcactatctgtacagctctgggcagatgacaaagcccagaattacgagtcagcaggtcggtcttctggggccagtgcagcctctaactcacttgtcattttgagcaaatctgtcaccgctcttgtcttctgtcttgtttctaaaataagcctgttgggctagatgatgcctgaagttccttcctagggaatcttctgtctaataagtggccgggctaggtcaacagatgaaataagcccacagtaacttaccacccg

SEQ ID NO: 7003 - DNA, 311 bp, Homo sapiens
  misc_feature 1..311: note = U/M: U (0.24:0.89) in Heart Cardiomyocytes + Fibroblasts
  misc_feature 1..311: note = source = chr3:194880273-194880583; Gene: XXYLT1 (intron)
  source 1..311: mol_type = genomic DNA
cgtggagtatctgcatatcatcccatggaaatatcagcatgaagacaagtgagtacaagctaaaggtgtagctttcaacacctccaagaccctgtcaccatcattgccgtcacggccctggcagcactcctcaggagctcctggctgtccaggggactattttcagggctgagaacacctatgtcttctgcctgggtttgaggcctggctggcggccgatgcttccgtacaattacaccacagagggccacatgcacggccccagtaccagctgggagattttcaaatcaacattcccaaggggatgtgcg

SEQ ID NO: 7004 - DNA, 329 bp, Homo sapiens
  misc_feature 1..329: note = U/M: U (0.22:0.87) in Heart Cardiomyocytes + Fibroblasts
  misc_feature 1..329: note = source = chr7:18095378-18095706; Gene: PRPS1L1 (Intergenic)
  source 1..329: mol_type = genomic DNA
cgttgttccattagtagtaatattttcatcagaacattgtttaacagtagcaagtgataacatttgtaggcagtaatcagagacttgacagctttcctcaccactaacattcttccatctaggagacaagagatgtaaatgaaatagaatacttcagaaaatgattattagccgatgctaactcaagtgccaagtcgaagttgagttacgtgtttaaaaaaagaaaaagtgatcttctgacattgctgtttcccagcggcttcattttataggtgatagtcataacagagtagggaatgaagtaggattatgcaaattttctcatctcg

SEQ ID NO: 7005 - DNA, 463 bp, Homo sapiens
  misc_feature 1..463: note = U/M: U (0.26:0.91) in Heart Cardiomyocytes + Fibroblasts
  misc_feature 1..463: note = source = chr1:9643254-9643716; Gene: SLC25A33 (TTS)
  source 1..463: mol_type = genomic DNA
cgacagagtgagactccatctcaaaaaaaaaaaaattgtgtcacattttggtggtggtgtgtggaccaggacaaacttcccagcaatttttcttctttgtacatttccaattacttgcagattgatcatctaagcgttcagactgctgagatgaatatatataactttctgagactcaatattttaagctataaaaaacttcctgaagttatccttttctccctactttgaaccaaaggcaagaatttttaaagaactgttttatcaatggcctggctcctggatatagttccggaagttaagaccagttgccttgttaagtgtgttgacagcacagctaccctgtttggctgtgaatccagaatgtgatgaagaacagtcattcccactgaggtctttagccctgttcttggacctctgctcttgcagaaaaggagcacaacgtaggactatggctcacccg

SEQ ID NO: 7006 - DNA, 190 bp, Homo sapiens
  misc_feature 1..190: note = U/M: U (0.27:0.91) in Heart Cardiomyocytes + Fibroblasts
  misc_feature 1..190: note = source = chr10:10954582-10954771; Gene: LINC00710 (Intergenic)
  source 1..190: mol_type = genomic DNA
cggcctcccaaagtgctgggattacaggcgtgtgccagtgcgcccagccaacggggctttttttgttgctgttgttcatttgctatagcagaagccagaaggggtgcaggagtatacagcatagataacatatctgtggcttacgcatactcccctgttgttcacatcctgatgaaaagcatgggctccg

SEQ ID NO: 7007 - DNA, 285 bp, Homo sapiens
  misc_feature 1..285: note = U/M: U (0.22:0.86) in Heart Cardiomyocytes + Fibroblasts
  misc_feature 1..285: note = source = chr4:184747561-184747845; Gene: STOX2 (Intergenic)
  source 1..285: mol_type = genomic DNA
cgactccctgtccccgtcactggccttcgaggcacagttcgtcttccctgtgaaagctgccactctgacctccctgctgagtaagtgtaacctctctgctttccatttccatggcttgtattctctacaccacttcactcctttcaaatacgagccattagcttgtcgaaagagcaagaacttggtatcacacagtcctgggacggctgcctgctagcaatgtggccctggcaggtcacaccatcgccctcaacttcagttttcccgaccgtggaatctgccccg

SEQ ID NO: 7008 - DNA, 321 bp, Homo sapiens
  misc_feature 1..321: note = U/M: U (0.18:0.82) in Heart Cardiomyocytes + Fibroblasts
  misc_feature 1..321: note = source = chr17:413761-414081; Gene: VPS53 (exon)
  source 1..321: mol_type = genomic DNA
cgaatcctggctcacccctcactaggcacatatccttgggcctgtcacttaccctctttgagcctccaagtcccgtccactaaacggagcttaacttagcaggaatttcatccgatgagataatgtatccaggacacagtaaatacacagttaccttttccttcccaccccaccaacatgtacagatagcactgaattgcccaggccctctcatgacctaagataccacatgcaggccacacagcagctggactgtgcagccagggcccagggctaccccaactgacctccactcccctcagcaccctcctctggcctccg

SEQ ID NO: 7009 - DNA, 344 bp, Homo sapiens
  misc_feature 1..344: note = U/M: U (0.21:0.85) in Heart Cardiomyocytes + Fibroblasts
  misc_feature 1..344: note = source = chr5:11012629-11012972; Gene: CTNND2 (intron)
  source 1..344: mol_type = genomic DNA
cggctgccaagcaaccctagcgcatctgaaacctggtgaatcggagggctactcatggtgttccgcccctcagcagaggtggccagagggctgccggaagtcagttcttacactgatggacaaggggtctcaagtcacctgcccaaggtcatgctgctggtaagtggcagggctgtgctgtggacccctggccatgcactctttgtatttcaccaaattgtaggatgagcctttcagacaccaatgtgatctccagttttatgagtagaagttgagtgtccctcatcaggaaagcatagtctctgtctattctcctctgcttcaaacaagcttggaggaatacg

SEQ ID NO: 7010 - DNA, 148 bp, Homo sapiens
  misc_feature 1..148: note = U/M: U (0.24:0.87) in Heart Cardiomyocytes + Fibroblasts
  misc_feature 1..148: note = source = chr20:56644429-56644576; Gene: C20orf85 (Intergenic)
  source 1..148: mol_type = genomic DNA
cgaggaggctctgaatcaaacagccgcctcttccctccagagcttcttcaggctgacccccaggcgcctttctatcaggggaaagattggacagcccggcagttatcgacagagacggccgacggacattgattgggactgcactgcg

SEQ ID NO: 7011 - DNA, 198 bp, Homo sapiens
  misc_feature 1..198: note = U/M: U (0.26:0.89) in Heart Cardiomyocytes + Fibroblasts
  misc_feature 1..198: note = source = chr10:1198278-1198475; Gene: LINC00200 (Intergenic)
  source 1..198: mol_type = genomic DNA
cggcctgacccacagttgatggtggaccatgggctttgatgcgtcagtctggtgtcaccgttggaactgcagaaacttttatctggagatgtgaacggaaaaggggttgagtgttctgagagccttctgcacgggagcagctccagtctcagtccatattccacggctgaccacagaacctgccaagagctgtcctcg

SEQ ID NO: 7012 - DNA, 248 bp, Homo sapiens
  misc_feature 1..248: note = U/M: U (0.12:0.75) in Heart Cardiomyocytes + Fibroblasts
  misc_feature 1..248: note = source = chr1:30393808-30394055; Gene: MATN1-AS1 (Intergenic)
  source 1..248: mol_type = genomic DNA
cgggttggcctgtcctgtccagggtacaacctggcagttcctgcctccctcctgctgacatgtgccccatctccactgaggtctctgtgacagctcctaggcgatcccacctcttgtcacccctggacgctcagcacctggtctgctgccagctcagagaagacaacagaggctatggagccagacagaccagggtgtgagaccttgttcaggaagaggtgacgaaggaccagctgcattgctgctcg

SEQ ID NO: 7013 - DNA, 304 bp, Homo sapiens
  misc_feature 1..304: note = U/M: U (0.26:0.89) in Heart Cardiomyocytes + Fibroblasts
  misc_feature 1..304: note = source = chr16:84092508-84092811; Gene: MBTPS1 (intron)
  source 1..304: mol_type = genomic DNA
cgcggcccccggggatgacagaagaagggaactatctgtatcttatcatcaatgtctgaaacagggaacacactgcagccggcagctcttaactccccaaccacaggacttagagctccagctcccatgaaatcactctgttggatcccagctttttaaaaaagaattaaccaaatgtaacaaaatgctaattatccaaagcactttttatgcaggataccaccaaagagcctatttccaaaggccaatacgaggttcactaaataactgtcgcaaatgacaagcttgaagatctgacaattcg

SEQ ID NO: 7014 - DNA, 154 bp, Homo sapiens
  misc_feature 1..154: note = U/M: U (0.28:0.9) in Heart Cardiomyocytes + Fibroblasts
  misc_feature 1..154: note = source = chr1:3706705-3706858; Gene: LRRC47 (intron)
  source 1..154: mol_type = genomic DNA
cggctgccttccgggcccatggcttttgcaggggacctgctgccggggaaggatcctaacttcatggtggtgacaggctgacataaaccaacccaataaggagcgccagcccctgagtgagccccactccctccggcagcaactgagaaactcg

SEQ ID NO: 7015 - DNA, 175 bp, Homo sapiens
  misc_feature 1..175: note = U/M: U (0.22:0.84) in Heart Cardiomyocytes + Fibroblasts
  misc_feature 1..175: note = source = chr19:5876222-5876396; Gene: FUT5 (Intergenic)
  source 1..175: mol_type = genomic DNA
cggcaacgcttccatcccacacagctgtcctgtggatgtgaagacaggtcctgagagagggcgctcactactcaagtcactgggagtctcaatcgcaccaggctgtcttcagttggacagctgtactctctgccccctgcctcctgcttaattcccagtcatccttcagggctcg

SEQ ID NO: 7016 - DNA, 200 bp, Homo sapiens
  misc_feature 1..200: note = U/M: U (0.19:0.81) in Heart Cardiomyocytes + Fibroblasts
  misc_feature 1..200: note = source = chr21:38966582-38966781; Gene: DYRK1A (Intergenic)
  source 1..200: mol_type = genomic DNA
cggtcaccctgtgtctgagtgccggctaagtagctgtccgcctgcatttcccactgcagtcttctcacttccaggacttgttagggtgcattagccagagctaattagcagtgagattgttgctgtggctcagagggtttcatagggcggctcttcgtggcttcagcatgggtgcacaccaagggatgacgtgaatagcg

SEQ ID NO: 7017 - DNA, 291 bp, Homo sapiens
  misc_feature 1..291: note = U/M: U (0.26:0.88) in Heart Cardiomyocytes + Fibroblasts
  misc_feature 1..291: note = source = chr9:129946857-129947147; Gene: RALGPS1 (intron)
  source 1..291: mol_type = genomic DNA
cggattctcagcctgggcaggagaaacactgaggacactgagcccccttcacattaggtgaaagtcaccgtgtgcaccagaggctcagagtggtacctgcaagagcacccggttgcacagttgtcaagccccctcctccagtgagaaaacgcaggctccaaagaatgagactggactgtgagctcccagctcagcgtggggcagaggctggactggaacccaagtcttgtgactccaagctgagtagtttcccctctgccacagctgcctcccattaatttctgatgtgcg

SEQ ID NO: 7018 - DNA, 359 bp, Homo sapiens
  misc_feature 1..359: note = U/M: U (0.18:0.8) in Heart Cardiomyocytes + Fibroblasts
  misc_feature 1..359: note = source = chr5:180207057-180207415; Gene: MGAT1 (Intergenic)
  source 1..359: mol_type = genomic DNA
cgtcatggttatctgaacgtgtcaaaggagaagagcatctgaagctgtttcacatcctacagcatgaggttcttgagaaggagctatctgtggtaagaagaaaatgaggcaacgagaaaaggctgttggccaaaaagctgagagtgacccagttactggcttcgctggactccagcccaatctagattgatgcttccactttttgaaatgtgctcgaacatctcagtctctcctctcctgctcatcatgcacttgtcagaaagctaaacttcttactttctcctgacagaaagggtctgacagtaaaccatgatatgtttagattaccattactttcatcacttaagtgcagaatcacg

SEQ ID NO: 7019 - DNA, 365 bp, Homo sapiens
  misc_feature 1..365: note = U/M: U (0.3:0.92) in Heart Cardiomyocytes + Fibroblasts
  misc_feature 1..365: note = source = chr5:56412004-56412368; Gene: GPBP1 (Intergenic)
  source 1..365: mol_type = genomic DNA
cgcattctgaggtactggggtttagaacttcaacacatgaattgtgttgaagggaatacaattcagcccacagaaggggctttgaattgggtttcttcaaaaggtgattcaattttgacaggcagaaatgagagtgcagaagggcattcccaaggagggaagaggaagcaagccctgagaggaatgcgagggtacagataggaatagattacgttctgcccctgagagctctgtcatgaaagaatgcagagtgactaagtccagttgggctgtgggtggacagtagcggagaagaaggtgtaaggtaggacgcaggcctgataatggaggtgttagacgcctttgtgtaacagtccataaagtcg

SEQ ID NO: 7020 - DNA, 472 bp, Homo sapiens
  misc_feature 1..472: note = U/M: U (0.3:0.92) in Heart Cardiomyocytes + Fibroblasts
  misc_feature 1..472: note = source = chr11:125551773-125552244; Gene: ACRV1,ACRV1 (promoter-TSS,Intergenic)
  source 1..472: mol_type = genomic DNA
cgctgcttctctgctcagctctcttgaacaactttgttttatataccactgaatgctaaatctagaatagatgtacttattgttacattttgaaaggaaggtgagggttaaagaaagagagagtggcggctctacatcaaatccaggctttctgtctagcataagacctacagaggtgggggactagcttaatgccagtgcccactgcttcgtacaggttggggtacttgtaggtatgagcaggacgggtctgggcagtatggcttgctgcctgggaagatgttcccataatgaggcattttggcccttgttcccgcagaatgtgatgctgatgttccttggactttttcccagcagagtgtgataaagtcagggaggcagttggacaggctgtttctaagggcccaaacccccgtggaatgcttcactttagccaaggtctgcaaaatggcgggggtcggtgggggttacg

SEQ ID NO: 7021 - DNA, 71 bp, Homo sapiens
  misc_feature 1..71: note = U/M: U (0.26:0.87) in Heart Cardiomyocytes + Fibroblasts
  misc_feature 1..71: note = source = chr17:12999196-12999266; Gene: ELAC2 (Intergenic)
  source 1..71: mol_type = genomic DNA
cgtgttgcctatcggttataacccaggtggggcatcttttctgctgcgacatgtgtacccgtcagccaacg

SEQ ID NO: 7022 - DNA, 80 bp, Homo sapiens
  misc_feature 1..80: note = U/M: U (0.25:0.86) in Heart Cardiomyocytes + Fibroblasts
  misc_feature 1..80: note = source = chr13:36448833-36448912; Gene: DCLK1 (intron)
  source 1..80: mol_type = genomic DNA
cgtcagaaaatacaataggaaaaccaggaccgttcccatgggacaataacgcccaaggtgtccgtggagattttgattcg

SEQ ID NO: 7023 - DNA, 238 bp, Homo sapiens
  misc_feature 1..238: note = U/M: U (0.24:0.85) in Heart Cardiomyocytes + Fibroblasts
  misc_feature 1..238: note = source = chr1:20634795-20635032; Gene: VWA5B1 (intron)
  source 1..238: mol_type = genomic DNA
cgctccctgggccagggacagtgtgggcagattgggttgggtaagatgccttcggcagaatctcaccccaaggtggactggagctgaggtctgggatcgctgcatgtctgggtgctggctccctaaggctgcgttccccaatcagcattccagacaggagcgaaccaggatgcagggggactgggcggggagtgaacattgggaggggggatgtggctctgtcaggaaatgaaggccg

SEQ ID NO: 7024 - DNA, 405 bp, Homo sapiens
  misc_feature 1..405: note = U/M: U (0.2:0.81) in Heart Cardiomyocytes + Fibroblasts
  misc_feature 1..405: note = source = chr8:94029501-94029905; Gene: TRIQK (Intergenic)
  source 1..405: mol_type = genomic DNA
cgttcagtcacttcaggactaagtaagaaataaacgaacaagcaaaatagcatctggagatgaaaatatcacctctattatgatcaggtctaggctgagggatgtgacttaggactgtagcaaaataggcttcttgatattgaaaacagacacagttgtccacactgccatgcacaattccagacttacacagacccactcctgtagtggcagagcatctccctctgaaattaatgttgtgttgctggggaacagtaccatgattcccaccggcaggcctgtttgcagataaggagacgctgcatgccccgatccaattccttttcccaaactcaccagcaggataaaaggctcccctcagaagaaaggcaagaggctggagaggccagaattgccggagtgtcg

SEQ ID NO: 7025 - DNA, 66 bp, Homo sapiens
  misc_feature 1..66: note = U/M: U (0.27:0.87) in Heart Cardiomyocytes + Fibroblasts
  misc_feature 1..66: note = source = chr2:10902655-10902720; Gene: ATP6V1C2 (intron)
  source 1..66: mol_type = genomic DNA
cgtcgtcgtcctgttatcttcaggcctttccttcgtctcacgtgctggcatttcttccccagcccg

SEQ ID NO: 7026 - DNA, 201 bp, Homo sapiens
  misc_feature 1..201: note = U/M: U (0.31:0.91) in Heart Cardiomyocytes + Fibroblasts
  misc_feature 1..201: note = source = chr2:235080572-235080772; Gene: SPP2 (Intergenic)
  source 1..201: mol_type = genomic DNA
cggctgctaaccagaggctccacggccgctagagaagtggccagtgacccagcctgcctcagtacagctatgaagtcttttgcagagaatgcaacttctgacctgccaaagtgaaaagcatggtaaatctgggttgagacactttcagcaggatcctacacaatctcgccccgtctcttacagaagccaccttcaccgccg

SEQ ID NO: 7027 - DNA, 219 bp, Homo sapiens
  misc_feature 1..219: note = U/M: U (0.22:0.82) in Heart Cardiomyocytes + Fibroblasts
  misc_feature 1..219: note = source = chr18:12997061-12997279; Gene: CEP192 (intron)
  source 1..219: mol_type = genomic DNA
cgtgggagggcttgcacagacagaagactcgatcatgttatggaagggggccgattggtagagtggttgtcagtgcagtgaggggttgggatcgagtgcaaagtgaagaggtgggcttcagacaggggcatggacacttcataaactgttgtgggataatttaggaatcagaccgaggggttgaggaggatatattatttaggtgcaccggcccagtcg

SEQ ID NO: 7028 - DNA, 327 bp, Homo sapiens
  misc_feature 1..327: note = U/M: U (0.28:0.88) in Heart Cardiomyocytes + Fibroblasts
  misc_feature 1..327: note = source = chr15:45232242-45232568; Gene: C15orf43 (Intergenic)
  source 1..327: mol_type = genomic DNA
cgaataaacttagagttttcttatcctgactgtgccgataaggagaatggccaacccgggtacacaaagtggaggccactgtccagtatctcttggcaggtcacactctatccttttctgctcacatcagctgggctgctaacacctcccagtgatagtgtatccaggctggtcacccgatgatggtgtcttgtccatttggaaggcccagaccaatcagcagaagtgaaaaactcaccctacaatttactgctcctagaacaaattctttgtcttgctgataattctcctgtgcatggctgaaactatcagctctgggacaatgcg

SEQ ID NO: 7029 - DNA, 133 bp, Homo sapiens
  misc_feature 1..133: note = U/M: U (0.26:0.85) in Heart Cardiomyocytes + Fibroblasts
  misc_feature 1..133: note = source = chr5:123964522-123964654; Gene: ZNF608 (Intergenic)
  source 1..133: mol_type = genomic DNA
cggagttgctgacatcgagtgggacaagattagagattctcagcctcccaggaggatatcgcattcatgttaggtgccaattcatcaatttccaccactggacgatgacaagggagtccctctagctgacccg

SEQ ID NO: 7030 - DNA, 256 bp, Homo sapiens
  misc_feature 1..256: note = U/M: U (0.27:0.86) in Heart Cardiomyocytes + Fibroblasts
  misc_feature 1..256: note = source = chr10:125971114-125971369; Gene: CHST15 (Intergenic)
  source 1..256: mol_type = genomic DNA
cgccctgcacagccattccctcaggccccctgtgttctcccacgcctctaggttttgaaaggcaactgcaagttcattttttagaagcccgtggactgctgtatctctgaggatttgataagaggagctaaagccacatgacccttatttggtgaactctgactcgctaaaggaatgcaatgcccttccatgggtcacacttccacggcctctcttagcgagctctgaggggtgctacagtgacgttcagagctcg

SEQ ID NO: 7031 - DNA, 406 bp, Homo sapiens
  misc_feature 1..406: note = U/M: U (0.27:0.86) in Heart Cardiomyocytes + Fibroblasts
  misc_feature 1..406: note = source = chr7:3272911-3273316; Gene: SDK1 (Intergenic)
  source 1..406: mol_type = genomic DNA
cgtcactacctcaatttggccgtaattgtaccgctcccataacaacagccaaataactggatatttgtggagggcttataacagggttgtccacaaagccactggcaacgccaaacagaccctgtatatcagcatctcacaagagagacagctatccgggggagcaattcttggcagctcccaatcaaacttgcagctgactgctgattacctctgcgtttccaatctgaggcacagcaccccatatttctcccacatttcctccgttacactcagtctcaggaccatcattccctcatggcctgcctgggacattaaaacaatgcacacacagaggaaaacacacaacaaaaactctttctctgcattgagagcaccaaattgcagcaaagatcagggaaccacg

SEQ ID NO: 7032 - DNA, 419 bp, Homo sapiens
  misc_feature 1..419: note = U/M: U (0.22:0.81) in Heart Cardiomyocytes + Fibroblasts
  misc_feature 1..419: note = source = chr7:91361379-91361797; Gene: MTERF (Intergenic)
  source 1..419: mol_type = genomic DNA
cggagtttgttgtattttcagcctccctcgtctaaagctactctcagtggaggaaggaaccagaggaatggctgccctcgctaaatcagtgtgagaaggtctgggaacacactgcacaatgtaacagaacattcttttccacaagtgtcagaatcacttatcttcaaatactagatcaacgcagctagagaactgggggaacttggagcccaaaaatataatacatagcttgcttaattttaaaccaatattttcctccacttacccaaatgcataaggcatactattttctgccccccaaaattcattttgttttatttcactctctcaaactgacaaacaggcattatacctgatacagactatattttaatagcgtctaacctctcctggttaaacaagtgtctgtttcaaatccg

SEQ ID NO: 7033 - DNA, 225 bp, Homo sapiens
  misc_feature 1..225: note = U/M: U (0.29:0.87) in Heart Cardiomyocytes + Fibroblasts
  misc_feature 1..225: note = source = chr8:10377668-10377892; Gene: PRSS55 (Intergenic)
  source 1..225: mol_type = genomic DNA
cggcccctccgacaccccattgactcacttggaatcagacagggttagatgggaatggcctctgagatctcatgtgcctgagccaagtctatggctgtgatctatcactggctgaaaatgccaacttggtggttaaagttgtaacctgggctgcagaacatcaacgccatcatcacagcaaactagttatggatgccttactatgctgtcgtcactgtgactgcg

SEQ ID NO: 7034 - DNA, 103 bp, Homo sapiens
  misc_feature 1..103: note = U/M: U (0.32:0.88) in Heart Cardiomyocytes + Fibroblasts
  misc_feature 1..103: note = source = chr12:121009925-121010027; Gene: RNF10 (intron)
  source 1..103: mol_type = genomic DNA
cgtggcgcgatcttggcttgctgtaagctccgcctcccgggttcacgccattctcctgcctcagcctcccgagtagctgggactataggcgcctgccaccacg

SEQ ID NO: 7035 - DNA, 188 bp, Homo sapiens
  misc_feature 1..188: note = U/M: U (0.34:0.9) in Heart Cardiomyocytes + Fibroblasts
  misc_feature 1..188: note = source = chr12:52936552-52936739; Gene: KRT71 (Intergenic)
  source 1..188: mol_type = genomic DNA
cgcaaacatgttgttgagtcttattccacttacccacctgctagatgacggtgctgacaggttgatgacagccaggagtctccggctctgaccatctcctgggcaggggcttttgagccttgccctaagccccagtcactactctaaatgtcctagatgtcaactcagaccatccgtcccttcctccg

SEQ ID NO: 7036 - DNA, 251 bp, Homo sapiens
  misc_feature 1..251: note = U/M: U (0.3:0.85) in Heart Cardiomyocytes + Fibroblasts
  misc_feature 1..251: note = source = chr7:141088827-141089077; Gene: TMEM178B (intron)
  source 1..251: mol_type = genomic DNA
cgagtctagtatagtgtcaccacttattgatctacaggatctaggaactgggcctttttgggtttctttaagctggcagaaacaaactccaaaccctaaactccagccagcggaaacatgccagcaaattcatcacttcttccagataccactactcacgttaggttcaagaggtacaagtacagaatgcatagtaaaaaacacgtagctattctgggctctcctctgtcaattacatataatggataacg

SEQ ID NO: 7037 - DNA, 365 bp, Homo sapiens
  misc_feature 1..365: note = U/M: U (0.36:0.91) in Heart Cardiomyocytes + Fibroblasts
  misc_feature 1..365: note = source = chr14:100566571-100566935; Gene: EVL (intron)
  source 1..365: mol_type = genomic DNA
cgggggcgggagacatcagctagtttggatgtatgcatacaatgtgagagtaccccaatttgaagctttcatgaggaggaacagttagttgtccactctggttcagctggtagtgacctcctttgcatggactgcaggtcctgcagcccactgacgaataagcttttgcttcagccgaggtccaagcctactgacaataccatgcgcagataagcagatgcaacttgatgaactgttaacacgtgtgtgcgcagttcccagtgccagaccgagaaagaaaatgtagtcagcaccaaaaggccctccccgcagtccctgcacttaagaatagatacgaagtccacttttgtttttgtttttgagcg

SEQ ID NO: 7038 - DNA, 378 bp, Homo sapiens
  misc_feature 1..378: note = U/M: U (0.31:0.86) in Heart Cardiomyocytes + Fibroblasts
  misc_feature 1..378: note = source = chr2:161231473-161231850; Gene: RBMS1 (intron)
  source 1..378: mol_type = genomic DNA
cggaaaagttagaatatccagattcaagttttgtcctggccaggagcaggaatgagtattatccctggaaggctcaggtcttcacgtgtgaaataagcaggttagcctggatgatttctaagcttccttccagctccaaaatactctaaaattctggatagtgctggacagtgccatctccagataagacatatcaagacagagcccagtcaggacctttagtactcttgtctgtctgccaaatagagaaatggagcaagagtttgttaaactggcagactccaaggccaacttctgtgacatcgtgcaacttaagaccaacagacatcatactgcggcaccattttcctatgccccttaggccagcatggattcccg

SEQ ID NO: 7039 - DNA, 255 bp, Homo sapiens
  misc_feature 1..255: note = U/M: U (0.26:0.8) in Heart Cardiomyocytes + Fibroblasts
  misc_feature 1..255: note = source = chr8:53475277-53475531; Gene: FAM150A (intron)
  source 1..255: mol_type = genomic DNA
cgttaggcctgggtgatggtgcttattacgtcactacagaaatatggggccatcattccaggcacatctggcagagatgagagtccttggcctcccggacctgcgagatattttcctcctgaatgaacgataacccctgccacctgctgagtgcaccccgtgagaacatccagataggcccttgtcctctatattctcatgtccctgtttgttcctgatccatgtgcaagtactccattcacagactcagatacg

SEQ ID NO: 7040 - DNA, 304 bp, Homo sapiens
  misc_feature 1..304: note = U/M: U (0.32:0.86) in Heart Cardiomyocytes + Fibroblasts
  misc_feature 1..304: note = source = chr2:62283634-62283937; Gene: COMMD1 (intron)
  source 1..304: mol_type = genomic DNA
cgaactcaatctgtcacttcagaggagaatgacgactgtgtttaagtcggcagataaagtggctgcgttcaaagccaaactggaattatgggggcgatgagtgaacattaggatttctgacatgtttcaaacatttgcagagattttgagagggattgagccaaggccttctttctcccagctggtgcatgatcaccaatctcagctttcaaaagagtttgagcattactttccaaccacaaaagacccatgagttgggaaggaatggatctaccacccatttgtgaataagccagtggaatcg

SEQ ID NO: 7041 - DNA, 409 bp, Homo sapiens
  misc_feature 1..409: note = U/M: U (0.28:0.82) in Heart Cardiomyocytes + Fibroblasts
  misc_feature 1..409: note = source = chr10:129481743-129482151; Gene: FOXI2 (Intergenic)
  source 1..409: mol_type = genomic DNA
cgaaaccatggaattatcctttcatgcttggttgtctgcgaggggcactctagtggaacagaagtgtggtgtcagggaagctgtgctctgggcattatcattacctcagggtccttactgcctggacttcttttccttggctgcctcagcttctgctccctttttttttgaagccccagccaacctcactccagtttcttgtgcaaccagcctggctccaggttccttatcacagagggtccctgaataaaccagaggctgggaaggatagggaacagatacagaaactttcaccactcccatgggctgacagcttccccggcaacctgccacagaacactgggtgagccccagctctccagcgaacatgacagtggtgtcgttggtgatagtgatggtgatgctgacg

SEQ ID NO: 7042 - DNA, 425 bp, Homo sapiens
  misc_feature 1..425: note = U/M: U (0.31:0.85) in Heart Cardiomyocytes + Fibroblasts
  misc_feature 1..425: note = source = chr3:13289021-13289445; Gene: NUP210 (Intergenic)
  source 1..425: mol_type = genomic DNA
cgccagaagctgggacttggctctctccttcttttcttcagcctggagctgaagcagaaatttctctctcataattttcactccatgagccttcgccctacagttaggggcatcagaatcacttacagtctcgatgccatcacatcagccgccttctcacttccaagtcaagtgcaaatttgataagtgagtttcatggtctccatctggatctggatctggagggagggccggggacttcctctgggctgttgacaccccccagccacctcccagggcacacaggcattgcaggcactgttccccactgcacgttccccatcttcccacagacacgctgtgggaaccctgcctccacggcctaaggagacgcacttactgggcctgtcttcctggggttccagtgggctctttgtccaggaccg

SEQ ID NO: 7043 - DNA, 178 bp, Homo sapiens
  misc_feature 1..178: note = U/M: U (0.34:0.87) in Heart Cardiomyocytes + Fibroblasts
  misc_feature 1..178: note = source = chr15:100653790-100653967; Gene: ADAMTS17 (intron)
  source 1..178: mol_type = genomic DNA
cgtgggctaccctaccagcttccacacggacaagttctgagaaagccagtctgcagtgggtgcacggggttgtgactaccaaatgcaagcttcggagaccacagagctaaggtcctgacatcttcagctttgcaacagcttccctccttttcattaagcggccccagctggcttggcg

SEQ ID NO: 7044 - DNA, 397 bp, Homo sapiens
  misc_feature 1..397: note = U/M: U (0.3:0.82) in Heart Cardiomyocytes + Fibroblasts
  misc_feature 1..397: note = source = chr8:26084698-26085094; Gene: PPP2R2A (Intergenic)
  source 1..397: mol_type = genomic DNA
cggtctgcctctccatacactcttccttccaaatgatctcccttgcttcagtgataacctctaatcatgactcctgaatctacacatggagctctggcctctctcccagactccagcctgtatttcccgactgttttttagatatgccacatgcatgtcccacttgaattcaaactcccctaaccgatgctgaactcctaatcatcactcagcaaacactcttcttcctgtgacaccccccaacctcgtctccatgaatgaatggcattaccacttaccctgggctagcaatctctagttttctccctccttcctgcagcgaacctgctagatcaggtcatgtcaagtctaactccatgacccctctcaagcccatcctgtctattccatttccacg

SEQ ID NO: 7045 - DNA, 398 bp, Homo sapiens
  misc_feature 1..398: note = U/M: U (0.34:0.86) in Heart Cardiomyocytes + Fibroblasts
  misc_feature 1..398: note = source = chr4:143002457-143002854; Gene: INPP4B (intron)
  source 1..398: mol_type = genomic DNA
cgcttaactttttaattaacgtgtgtccttgctgatagacactgtgaatgaagcactttttccttcccattacggcttacagtttagatttaattactgtggaaatgaatcaagaaacatgacttcgggcacagcattttaaatgtcggcagagtaaccatattaattctctattttaaagtatcagtgtcatcccatcttcatgatgagtgatgtgaaaataactttagaaaggaggttactgacccagagattctgtgggccatgggaatatcacctattagttgtaatttggaaagcttttgtttggataatgagttagtttaattttgcaagtactcataaatacttatgcatcatgaaaacttgctcttacagtgttatatatgagattttcg

SEQ ID NO: 7046 - DNA, 420 bp, Homo sapiens
  misc_feature 1..420: note = U/M: U (0.14:0.91) in Heart Cardiomyocytes + Fibroblasts
  misc_feature 1..420: note = source = chr1:165378811-165379230; Gene: RXRG (intron)
  source 1..420: mol_type = genomic DNA
cgaccccagcactgtgggcactgctccggtggacatgtaaacccgtggccagaaggatgccatcctgcacggaaactgagcggtgggagaaagaggcaatcagcaattcattccaccctgcaaggataaggaggaggtcttgagggaaaacagaacacattctttctttacttataatcacccaaggcatgtactattatcccacataacacaagcagaattgacaatctagggaggttaagaattagttcaagatgacacagttcattagcgaagaaacaaaggataagactggggtctcctgacttatggctctgcacatccccccactctctctcagatgcaacccagaatgacagcttgaagacaaggattctttttttttttaatcagtcaacaaatgtgggttgaacatttagc

SEQ ID NO: 7047 - DNA, 98 bp, Homo sapiens
  misc_feature 1..98: note = U/M: U (0.16:0.86) in Heart Cardiomyocytes + Fibroblasts
  misc_feature 1..98: note = source = chr8:53788177-53788274; Gene: NPBWR1 (Intergenic)
  source 1..98: mol_type = genomic DNA
cgaagagttgctgagtgcagagggcattccagtgtaggcgatgtgagaaaggttgcaggtgtgggtgagctggcggtgcaggcgctgacaggcagacg

SEQ ID NO: 7048 - DNA, 194 bp, Homo sapiens
  misc_feature 1..194: note = U/M: U (0.24:0.87) in Heart Cardiomyocytes + Fibroblasts
  misc_feature 1..194: note = source = chr8:25435658-25435851; Gene: CDCA2 (Intergenic)
  source 1..194: mol_type = genomic DNA
cgtgtaggtgccactggcttgactatcacattggaaaagagagcaggggtaaaaattaaagaagaaagagaagacaagaaaggagagggagagagaatagaagaagaatggagtgttctcatgatagaggtcacctaccgatgcttgtaagacagtccttgctggagctcccagagccttccacgtcacgtccg

SEQ ID NO: 7049 - DNA, 331 bp, Homo sapiens
  misc_feature 1..331: note = U/M: U (0.25:0.88) in Heart Cardiomyocytes + Fibroblasts
  misc_feature 1..331: note = source = chr13:38521846-38522176; Gene: TRPC4 (Intergenic)
  source 1..331: mol_type = genomic DNA
cggcacagtgatagacagaggcagtaggaaatgaagtcagaaagataaacaggggtagttaagagtttacattcattttatgtgtgatgagaagccattggaagaagtatattttcttatttatatttgagaaggcatattctacttttgcctggacaatagactccatgggagcaggagtagaaacaaagcgacaagctaacaagctaattataatattctagggtttggaccataggtgtctgagatgggatgacagcagtgaagataagacttggttagattcgaagtatattttgaagctgaagtcaataccgtatctttcttcacg

SEQ ID NO: 7050 - DNA, 352 bp, Homo sapiens
  misc_feature 1..352: note = U/M: U (0.06:0.91) in Heart Cardiomyocytes + Fibroblasts
  misc_feature 1..352: note = source = chr8:140847731-140848082; Gene: TRAPPC9 (intron)
  source 1..352: mol_type = genomic DNA
cggatggatgtctaatatctattcatctaggtatctatttttgtatccacgagacatcctcactaataaacctggggacagtggggaaagcagcaagaaaggccaatcagtgctgctgctgtaaagcgatcaagtcccaaaggacagcagacaagagacactgctgccaaatctgctttctttaattaaggcggagattgataagagctgtcagagtgaaatgaagagactccaggcctcactgctttgccaagacatgagagggaaagctgaagattaaaaaacaaaaaaaaaaaaagcttccctagaaagcccacagaatccgttacaaaaaggatgaggctccgaggac

SEQ ID NO: 7051 - DNA, 166 bp, Homo sapiens
  misc_feature 1..166: note = U/M: U (0.11:0.91) in Heart Cardiomyocytes + Fibroblasts
  misc_feature 1..166: note = source = chr1:154680603-154680768; Gene: KCNN3 (exon)
  source 1..166: mol_type = genomic DNA
cgcagggtgtcggcgatgagcagcggcagggagttgaagctggcggtgagatgctccagcttcgactccaggctgccaatctgcttctccaggtcttcgctccggtcattgagttctgtgattaagtcatacatgacattctgcatctgtgtggagagagagaggc

SEQ ID NO: 7052 - DNA, 421 bp, Homo sapiens
  misc_feature 1..421: note = U/M: U (0.11:0.91) in Heart Cardiomyocytes + Fibroblasts
  misc_feature 1..421: note = source = chr6:11999385-11999805; Gene: HIVEP1 (Intergenic)
  source 1..421: mol_type = genomic DNA
cgatgttgactgaaacagaagtatgtagaaaggaagcaccaaacttactgcaagaacagtgagtggacccatttagctggagtgaaggctttgtttagggaagtaagtaaacataatgttttgaggtgatcgcttccaccatatcgaggtttaaagaccagctagggaatgtgtatcttgtagttagagggaagcgactcggtttcttcagtgagggagttacatgatgacagcattccttttaggagataattagggtggtgtgcctgattcagagaagctaggaatgtttggactctagccctatcttttccaagttgatgtcatggtagacaactgcattctctccccagacactcttagatgttaatattggcaacactggaagaatctgttgagcagtttttatgaaatgtaatac

SEQ ID NO: 7053 - DNA, 373 bp, Homo sapiens
  misc_feature 1..373: note = U/M: U (0.11:0.86) in Heart Cardiomyocytes + Fibroblasts
  misc_feature 1..373: note = source = chr22:17620937-17621309; Gene: CECR5 (intron)
  source 1..373: mol_type = genomic DNA
cgagccacagacatacactttaaaagtgacaagagcataccataccccgtctctctgggactactgagacgggccctgaggcagtactgggccgtgcccaccctctgctgacgagcactgtcgactgggggtcaacagcaggctgagactcaagagactggccatgcagataacagcaaccgaacagtacacagcagctgtcagctggccttcaagtaagcaccctgaggccaaaaaagggctgcctctatctgtgctagccccagaataagacaggacacatgacaccaacacagctgagcagggagtataggcacctgcatgcccctgagaaagccacttatctgctgggtctcagttctctggtctatac

SEQ ID NO: 7054 - DNA, 253 bp, Homo sapiens
  misc_feature 1..253: note = U/M: U (0.12:0.89) in Heart Cardiomyocytes + Fibroblasts
  misc_feature 1..253: note = source = chr1:154680517-154680769; Gene: KCNN3 (exon)
  source 1..253: mol_type = genomic DNA
cggagattggggtgtgggtggtgcccactgccacgctgacaccccgggcctcgatgatggcagacaggagctgctgctgctgctggcgcagggtgtcggcgatgagcagcggcagggagttgaagctggcggtgagatgctccagcttcgactccaggctgccaatctgcttctccaggtcttcgctccggtcattgagttctgtgattaagtcatacatgacattctgcatctgtgtggagagagagaggcg

SEQ ID NO: 7055 - DNA, 104 bp, Homo sapiens
  misc_feature 1..104: note = U/M: U (0.1:0.85) in Heart Cardiomyocytes + Fibroblasts
  misc_feature 1..104: note = source = chr14:57418432-57418535; Gene: OTX2-AS1 (Intergenic)
  source 1..104: mol_type = genomic DNA
cgcctacccacatccagccacacattttttccatgcaggcacatgggcaatgcccaaaaccctgctccaccgctgggctcgcattagccggcctcccaaccacg

SEQ ID NO: 7056 - DNA, 165 bp, Homo sapiens
  misc_feature 1..165: note = U/M: U (0.18:0.88) in Heart Cardiomyocytes + Fibroblasts
  misc_feature 1..165: note = source = chr14:71650466-71650630; Gene: SNORD56B (Intergenic)
  source 1..165: mol_type = genomic DNA
cgagattgcgacactgtactccagcattggtgacagagtcagactccatctcaaaaaaaaaaaaaaaaaagaaaagaaagtgctaagacgggcgtcatagggagtcagggaggtcctgaaagaaggtggcatttgagaaactgaagaagagctggggtggtttcg

SEQ ID NO: 7057 - DNA, 75 bp, Homo sapiens
  misc_feature 1..75: note = U/M: U (0.23:0.91) in Heart Cardiomyocytes + Fibroblasts
  misc_feature 1..75: note = source = chr6:7425578-7425652; Gene: RIOK1 (Intergenic)
  source 1..75: mol_type = genomic DNA
cgctcttgtctcccaggctggagtgcaaaggcacgatctcggttcactgcaacctctgcctccccggttcaagcg

SEQ ID NO: 7058 - DNA, 192 bp, Homo sapiens
  misc_feature 1..192: note = U/M: U (0.18:0.86) in Heart Cardiomyocytes + Fibroblasts
  misc_feature 1..192: note = source = chr20:25445183-25445374; Gene: NINL (intron)
  source 1..192: mol_type = genomic DNA
cgacaacactcccccaatctgctttgccccctacacacacaggcgcacacatgatgtcttcccttctccacagccgcctgcctcccggggacagcagctctcacgcggctgctgtgcagctactgcttcaggacagtggccttgatgtccccacacttcattttgtcaacgagcctggcagcatccttcccg

SEQ ID NO: 7059 - DNA, 172 bp, Homo sapiens
  misc_feature 1..172: note = U/M: U (0.21:0.88) in Heart Cardiomyocytes + Fibroblasts
  misc_feature 1..172: note = source = chr1:243432142-243432313; Gene: SDCCAG8 (intron)
  source 1..172: mol_type = genomic DNA
cgtgccattgcagttagagggcctctggtgctggagtcctctggaggactgggctgtcagagtggggcagcggggtgcagcgcggggagggcttttctctttcttcgtgcctctggtgctggagtcctctggaggactgggctgtcagagtggggcagcggggtgcagtgcg

SEQ ID NO: 7060 - DNA, 357 bp, Homo sapiens
  misc_feature 1..357: note = U/M: U (0.2:0.86) in Heart Cardiomyocytes + Fibroblasts
  misc_feature 1..357: note = source = chr9:90424981-90425337; Gene: CTSL1P8 (Intergenic)
  source 1..357: mol_type = genomic DNA
cgccaacaacctaaatgagcctggagacaaattctcccctggagcctcttgataaggagccagactggctgtcatctcaattttgtactcaggagaccctaagcagaaaacccagccaagccgactggacttctgacctacagaagtgggaggcaatcaacaagtgttgtttgctgcctctaagtgtgtggtgatttgttctggcagcaaaagaaaatgaatgccgttaagaggtgaggtgcagaaagaagaaacagagtgggtctttggatgccccctggaacctaatactatgtttgacattggtgttgcatccagatttcaaaacaagatcccggctgtccttctacagtatcg

SEQ ID NO: 7061 - DNA, 377 bp, Homo sapiens
  misc_feature 1..377: note = U/M: U (0.26:0.91) in Heart Cardiomyocytes + Fibroblasts
  misc_feature 1..377: note = source = chr9:98978744-98979120; Gene: HSD17B3 (Intergenic)
  source 1..377: mol_type = genomic DNA
cgcgtgaggcttatcagccacaggaacacgtccttccagcagggttagaggatcccaaagagagcagagactccagggaaaagaagaagagcacggagtcagcatggagacagtgcttatctgcaggcggggagccaggagggattctttgcccttcttgactatacttttcaaattctctaaaatgtttcagaaataagataatcacaaagtctgcaagtatccccccacaaggtataatcactttacagtggagaacacagcagacatcacctaaccaagtgataaaggtgacatctccaggaacggctgctccctggcagaggcaggggtggggggtgcaccaggaagaacccagcaccgcccctgggattccg

SEQ ID NO: 7062 - DNA, 424 bp, Homo sapiens
  misc_feature 1..424: note = U/M: U (0.22:0.85) in Heart Cardiomyocytes + Fibroblasts
  misc_feature 1..424: note = source = chr9:99842251-99842674; Gene: LOC340508 (intron)
  source 1..424: mol_type = genomic DNA
cgcatgttcctgtagtcccagcaactcaggagactgaggcggggggatcactgagcctaggagttcaagtctagcctgggctaaatatagtaagacactgtcacaaaaaataataatcaaatcttcaggagaatgttcatgctcagccttatcatatgccccgccggcagaactccaacattcctattccctcccctttacagccacctaaaacagctgaaccaaaacttagactagcaatccctatgatgaccttccctacccctgtcccaattcctacataccccttccaatactccccaaataaagagaatttactggtggcatcttacactctggtccagttctgagttgcctgtgatacgacagccaaataatttgccaaggtgactgaggacctctcagatttgccgaggaattctcg

SEQ ID NO: 7063 - DNA, 271 bp, Homo sapiens
  misc_feature 1..271: note = U/M: U (0.26:0.87) in Heart Cardiomyocytes + Fibroblasts
  misc_feature 1..271: note = source = chr11:134232343-134232613; Gene: GLB1L2 (intron)
  source 1..271: mol_type = genomic DNA
cggctgccactcggagcgccgggtgtgggagaggctgttgacaggagttcttccccctgggatgactgggccgtggggctttttcaagaagggacactcacttgtcggagtgtggggctgtgtctgccactgttgagtgtttctggagaagtcctgggttcttgccgcagctgttctgggccaggccggcggtggacaggaatgtgctgtggacactgcctttcttcctcttcccgccctcccctccacctgccacacacgcccactcccg

SEQ ID NO: 7064 - DNA, 195 bp, Homo sapiens
  misc_feature 1..195: note = U/M: U (0.2:0.79) in Heart Cardiomyocytes + Fibroblasts
  misc_feature 1..195: note = source = chr9:89251759-89251953; Gene: ZCCHC6 (Intergenic)
  source 1..195: mol_type = genomic DNA
cggaggcagcaggcaggggaggagattcggctgatctgtgtccaggtcctgctctgaggctccctggctcaacacgacctattcaccccgctgactttggcctcctcatctgcaaaacgggaggaatttctgccatgcctgactcacagggttgctgtgaagattaaatgagaatatatttgtaatttgggaacg

SEQ ID NO: 7065 - DNA, 164 bp, Homo sapiens
  misc_feature 1..164: note = U/M: U (0.26:0.84) in Heart Cardiomyocytes + Fibroblasts
  misc_feature 1..164: note = source = chr9:98836406-98836569; Gene: LOC158435 (intron)
  source 1..164: mol_type = genomic DNA
cgcagcttgtctgcatcctccaagtgttcacacctcggctcctctggccctggcttcccaagcccctctctcggtgcccacctctcacgccaatcctgcttctggacatagcccaaagggaagaggcagctcactggagcaacttcccagccattccctgtccg

SEQ ID NO: 7066 - DNA, 153 bp, Homo sapiens
  misc_feature 1..153: note = U/M: M (0.86:0.23) in Heart Cardiomyocytes + Fibroblasts
  misc_feature 1..153: note = source = chr5:122430084-122430236; Gene: PRDM6 (intron)
  source 1..153: mol_type = genomic DNA
cgggtgggagggagctttggcttcagtgcgtgggcttttgtgtttctctctctctctctctctctctctcgcgtgtgtgcaagcccagcctcatcccataacacacatgatttagctattttacatctttcgttatctagcgccctgaaaccg

SEQ ID NO: 7067 - DNA, 254 bp, Homo sapiens; identical to SEQ ID NO: 3256
  misc_feature 1..254: note = U/M: M (0.66:0.08) in Heart Cardiomyocytes + Fibroblasts
  misc_feature 1..254: note = source = chr3:138892681-138892934; Gene: PISRT1 (Intergenic)
  source 1..254: mol_type = genomic DNA

SEQ ID NO: 7068 - DNA, 89 bp, Homo sapiens
  misc_feature 1..89: note = U/M: M (0.67:0.1) in Heart Cardiomyocytes + Fibroblasts
  misc_feature 1..89: note = source = chr17:6555695-6555783; Gene: MED31 (promoter-TSS)
  source 1..89: mol_type = genomic DNA
cggtttcatggaaacaaaccataaatcaatgtaagaaacagccaagccgcagtttctgaacacagccaacgtttactgaccgtcctgcg

SEQ ID NO: 7069 - DNA, 210 bp, Homo sapiens
  misc_feature 1..210: note = U/M: M (0.71:0.15) in Heart Cardiomyocytes + Fibroblasts
  misc_feature 1..210: note = source = chr2:205180004-205180213; Gene: PARD3B (Intergenic)
  source 1..210: mol_type = genomic DNA
cgtccaagccgcaccgtccagagctattaacctctcccaagaatgtcatcaatcatgcttggcacgtgggctttgctagacaaatctaacaacatctgccatgcattctgcaacttccttttgattcctcacactttattttcactttcatctctgtgtgctggtgagatttatgtctgatccctttcagatgccaaggagttggtaacg

SEQ ID NO: 7070 - DNA, 234 bp, Homo sapiens
  misc_feature 1..234: note = U/M: M (0.76:0.22) in Heart Cardiomyocytes + Fibroblasts
  misc_feature 1..234: note = source = chr5:122429499-122429732; Gene: PRDM6 (intron)
  source 1..234: mol_type = genomic DNA
cgtttctgagtagcatcccggctgttctctcagcacagcccattagtttttcaggccttttttgtaaagatgtgcttccctaggacctgggagggaggcgggaactgagccactttgggtgtctcgggggagagttggaccactttgcaaattccccagttgggggaggggtctctgtcccctcccgatttactggaaccctcctgcgcagggaacaggctggaaacagcgccg

SEQ ID NO: 7071 - DNA, 422 bp, Homo sapiens
  misc_feature 1..422: note = U/M: M (0.76:0.22) in Heart Cardiomyocytes + Fibroblasts
  misc_feature 1..422: note = source = chr4:175133405-175133826; Gene: CEP44 (Intergenic)
  source 1..422: mol_type = genomic DNA
cgcggtggccgctttgcctttgtttttattctagttttctttggtgggtcatttttaattctcttctttgttaaggggtagttaaatctgtatctttgtgctcagcaagagtggcccgtgtagttaagaaggcccagagagcttccttgccccagtgttcaatgggcagcttcccttctcactgaggaggagactttcagtggagaaagagaaatggaaaaactttccagcaaaatcagtcaatgcatggagaaacctgcctttcaggagctgctaattctttcccaggcaactcctactcccctagagaggaggaggagaatgagacctcaggtaagtaaaagatccaagctcagtgctgatggagtgagaaaaatccctctctcagtgagggacagaacctgctttttgtcttgaagtcg

SEQ ID NO: 7072 - DNA, 140 bp, Homo sapiens
  misc_feature 1..140: note = U/M: M (0.72:0.21) in Heart Cardiomyocytes + Fibroblasts
  misc_feature 1..140: note = source = chr16:88124298-88124437; Gene: BANP (Intergenic)
  source 1..140: mol_type = genomic DNA
cgtttccttttctgtcaaattcacaatgggatctggcccttgactccaccccagcagcaccaaagacaccgccctgcactcattacatttcctcccagcccgcggggggtcggggggggtggtgggggtgagggtgggcg

SEQ ID NO: 7073 - DNA, 232 bp, Homo sapiens
  misc_feature 1..232: note = U/M: M (0.64:0.16) in Heart Cardiomyocytes + Fibroblasts
  misc_feature 1..232: note = source = chr9:139636813-139637044; Gene: LCN10 (intron)
  source 1..232: mol_type = genomic DNA
cggcccccaactctgcctgctgccaaccctagcgccctgggcaccgccgtgccaatgagtgctgctcccacggctcactcagcaggtgcccgggccctcccgctacagaatatgccccgcttgctccacacccactctgcactctgggcgtctcccgacctcctcggccacagctctctgggcccctccaccctggccctccctgacccccctgggcccccgaaccccctcg

SEQ ID NO: 7074 - DNA, 74 bp, Homo sapiens
  misc_feature 1..74: note = U/M: M (0.64:0.17) in Heart Cardiomyocytes + Fibroblasts
  misc_feature 1..74: note = source = chr2:120436418-120436491; Gene: TMEM177 (promoter-TSS)
  source 1..74: mol_type = genomic DNA
cgtgcgccaccacgcccagctaatttttgtattaatcaaagacgcatttcaacgcagaggaggaagtgctagcg

SEQ ID NO: 7075 - DNA, 485 bp, Homo sapiens
  misc_feature 1..485: note = U/M: M (0.65:0.18) in Heart Cardiomyocytes + Fibroblasts
  misc_feature 1..485: note = source = chr5:122428966-122429450; Gene: PRDM6 (intron)
  source 1..485: mol_type = genomic DNA
cgggggtgcctccttacttctcccttccctttagcaaagtaactttttgcctaggatcagcaatacatatcattgctctgtaagaaaagaacttaggaacactagtttcaccttgaaactttattggcatctatggtaaatgtcacagtgatggggcttgtagctctctttcgttctaaaagattttaaaacagcagaaactgcaagctacccgggtgagcttttccagtatgttcctaactccgtatcagtttaccctgtgactgaagtacagtttccaccgaagctctgaatgctttgctgttgctgctgctgccgccttctcttaaaaatcaagtggtgcctcctgcgatataaatgggggatggggcccttccttccccgtctaatattactgccctcatttgctgctgggctgcctgaagccattgatttagtcaggctccatcggagtggcctcttcccgggttctgggagctggtgcg

SEQ ID NO: 7076 - DNA, 36 bp, Homo sapiens
  misc_feature 1..36: note = U/M: M (0.62:0.16) in Heart Cardiomyocytes + Fibroblasts
  misc_feature 1..36: note = source = chr15:63674449-63674484; Gene: CA12 (promoter-TSS)
  source 1..36: mol_type = genomic DNA
cgcagagcttgccgtgccggagaccggaggttttcg

SEQ ID NO: 7077 - DNA, 148 bp, Homo sapiens
  misc_feature 1..148: note = U/M: M (0.59:0.15) in Heart Cardiomyocytes + Fibroblasts
  misc_feature 1..148: note = source = chr5:32843436-32843583; Gene: LOC340113 (Intergenic)
  source 1..148: mol_type = genomic DNA
cgggcctccacagagggctgcacggtggcctcttgccagacagtatcctcgtggtgcgtctcagctgcagactcaggttcagatcagagagcagtttgttcctctggtcatgcagataagcatctgtttgctctctctcttcctgccg

SEQ ID NO: 7078 - DNA, 154 bp, Homo sapiens
  misc_feature 1..154: note = U/M: M (0.66:0.25) in Heart Cardiomyocytes + Fibroblasts
  misc_feature 1..154: note = source = chr11:67417821-67417974; Gene: ACY3 (intron)
  source 1..154: mol_type = genomic DNA
cggggagacactgctttgggagctgtctaggtgttctccttacttgttgcaagaaataaaatcccctattaaatcctctttagttaacacccgccaagcaactgagcccacccgttgtgtgggtaacaaaactctggcgacccagatggggccg

SEQ ID NO: 7079 - DNA, 241 bp, Homo sapiens
  misc_feature 1..241: note = U/M: M (0.61:0.21) in Heart Cardiomyocytes + Fibroblasts
  misc_feature 1..241: note = source = chr22:51059793-51060033; Gene: ARSA (Intergenic)
  source 1..241: mol_type = genomic DNA
cgtcataaagtgtgcacagcttgcgagtgtgggttgatcgctttatacatatgcatgcatcatgttatgaccccttaagatttggaagatttgtagcacccacaggttctctggtgtccctggtcaggcaactccacacaccccaccctaccagaggcagtgacttcaatcacactgaaaatttcaggtgcatctgacatcccgggattaagctcatctcctttgctagactgtaagcccg

SEQ ID NO: 7080 - DNA, 252 bp, Homo sapiens; identical to SEQ ID NO: 6890
  misc_feature 1..252: note = U/M: M (0.63:0.23) in Heart Cardiomyocytes + Fibroblasts
  misc_feature 1..252: note = source = chr14:95757675-95757926; Gene: CLMN (intron)
  source 1..252: mol_type = genomic DNA

SEQ ID NO: 7081 - DNA, 358 bp, Homo sapiens
  misc_feature 1..358: note = U/M: M (0.55:0.22) in Heart Cardiomyocytes + Fibroblasts
  misc_feature 1..358: note = source = chr1:244504815-244505172; Gene: C1orf100 (Intergenic)
  source 1..358: mol_type = genomic DNA
cgcgagggaaaatcacgggtcccgcaagcacactctgtaacaatgcctcttcccaggaggggccccccaccaggctgacgattgtcttcaggctccatcgatgttttccgttgtttaaagacacacattaacgtaaagtctcctcccattctctctgtaaattacagcattcagaagaagtggcagctgctgtaattaagacacagttaattgcctatctccttaattgcagtgataggattttgacagtttggtaaataagaattgtttggtttcctctggcaacttcagcctcagtcagttctctcctgcaagtgctgagtcacccagtctggggacaaagggctgtggtccaacg

SEQ ID NO: 7082 - DNA, 162 bp, Homo sapiens
  misc_feature 1..162: note = U/M: M (0.61:0.29) in Heart Cardiomyocytes + Fibroblasts
  misc_feature 1..162: note = source = chr19:51069087-51069248; Gene: LRRC4B (intron)
  source 1..162: mol_type = genomic DNA
cggctccccgactctttctttcggaaattaagtgagtaactccgtgactccgtgctgatgccctaattgcctgtatgtgtgtttcggaggctgggtcccttctctccctctgtgcctccctccctggctcccactcttcccttccttgggtctctctccccg

SEQ ID NO: 7083 - DNA, 166 bp, Homo sapiens
  misc_feature 1..166: note = U/M: M (0.84:0.23) in Heart Cardiomyocytes + Fibroblasts
  misc_feature 1..166: note = source = chr5:122429855-122430020; Gene: PRDM6 (intron)
  source 1..166: mol_type = genomic DNA
cggttgcttgctaaggggtcaaggaaagagacaaaggagggcgagtgttttctgaccttccctaatcccttcccacccaggtggaaaacgcaggtcctgtttgggcaacttcgagcccagtggcacaccagcaggctttttgtgcaaccgaggaacatccactgcg

SEQ ID NO: 7084 - DNA, 185 bp, Homo sapiens
  misc_feature 1..185: note = U/M: M (0.86:0.26) in Heart Cardiomyocytes + Fibroblasts
  misc_feature 1..185: note = source = chr5:122430326-122430510; Gene: PRDM6 (intron)
  source 1..185: mol_type = genomic DNA
cgatatgtgccaccaggagatgaaggatgaggggacaagccacaattaattgccctatagttttgtaggagagagtggagccagcccagacccgcttcgatctcctctcgcggctcctattcatcatctccgcattgtatatggcagcctcgcaggggcaggggccggcgaggtttatctctgcg

SEQ ID NO: 7085 - DNA, 361 bp, Homo sapiens
  misc_feature 1..361: note = U/M: M (0.7:0.19) in Heart Cardiomyocytes + Fibroblasts
  misc_feature 1..361: note = source = chr5:122422553-122422913; Gene: PRDM6 (Intergenic)
  source 1..361: mol_type = genomic DNA
cggattacccaggtacgccacctgtagacgtagtgggcgagggggactttgctaccttctcagcttcttccctggaccccgcagcgaggggaaccaaatctctcccatgatagcccctctggcgtcagtctggaccgagtggctacaggttggactagggtaggcagaagatgcacttggcaccttaccgaacggtatttgaatccgtctccattactcattaatggcgtgaccttaggcaacccatctaaactttccgaacctcagcggtccccatctacaatatgggggttaatgataatgccttctccgcatgtaggtggattaaatggacataaagcgcctacccccgcccggcacg

SEQ ID NO: 7086 - DNA, 251 bp, Homo sapiens
  misc_feature 1..251: note = U/M: M (0.66:0.18) in Heart Cardiomyocytes + Fibroblasts
  misc_feature 1..251: note = source = chr5:122434379-122434629; Gene: PRDM6 (intron)
  source 1..251: mol_type = genomic DNA
cgcatttagcctggagaacagccgtcggggcaggagttggtgccttctctaacaattaggctgatcgttaaatttgctattcctttcttccggcgtctagggagagcgtgcacaccaaaccctccagaacagcaccccggtcccccaccccgccccacctgtccccgccctgcttcagtgcctggagggagaactgactggtcgcttgagggaccccatttcgggcgcgcccttggagtcctggggctgcg

SEQ ID NO: 7087 - DNA, 70 bp, Homo sapiens
  misc_feature 1..70: note = U/M: M (0.62:0.19) in Heart Cardiomyocytes + Fibroblasts
  misc_feature 1..70: note = source = chr4:175138256-175138325; Gene: CEP44 (Intergenic)
  source 1..70: mol_type = genomic DNA
cgcttggttgccagaccgcgccctttgcgggtctatcaaaagggcaagcgcatattctggagctgtctcg

SEQ ID NO: 7088 - DNA, 29 bp, Homo sapiens
  misc_feature 1..29: note = U/M: M (0.57:0.17) in Heart Cardiomyocytes + Fibroblasts
  misc_feature 1..29: note = source = chr15:92938493-92938521; Gene: ST8SIA2 (intron)
  source 1..29: mol_type = genomic DNA
cgctcttctcgagtcccgcgccgcgtgcg

SEQ ID NO: 7089 - DNA, 134 bp, Homo sapiens
  misc_feature 1..134: note = U/M: M (0.58:0.19) in Heart Cardiomyocytes + Fibroblasts
  misc_feature 1..134: note = source = chr22:39152650-39152783; Gene: SUN2 (promoter-TSS)
  source 1..134: mol_type = genomic DNA
cgagatctcactatgtttgcctaggctggtcacgaactcctgagctccagtgattctcccgcctcggcttcccaaagtactaggattacaggtatgagccaccgcgcccggccagctcttctgttttaaggacg

SEQ ID NO: 7090 - DNA, 62 bp, Homo sapiens; identical to SEQ ID NO: 6898
  misc_feature 1..62: note = U/M: M (0.6:0.22) in Heart Cardiomyocytes + Fibroblasts
  misc_feature 1..62: note = source = chr5:122434244-122434305; Gene: PRDM6 (intron)
  source 1..62: mol_type = genomic DNA
